(19) United States
(12) Patent Application Publication
(10) Pub. No.: US 2012/0264636 A1
(43) Pub. Date: Oct. 18, 2012

(54) GENETIC VARIANTS INDICATIVE OF VASCULAR CONDITIONS

(75) Inventors: Hilma Holm, Mosfellsbaer (IS); Daniel Gudbjartsson, Reykjavik (IS)

(73) Assignee: deCODE Genetics ehf., Reykjavik (IS)

(21) Appl. No.: 13/500,264

(22) PCT Filed: Oct. 7, 2010
(86) PCT No.: PCT/IS2010/050008

§ 371 Date: Jun. 25, 2012

(30) Foreign Application Priority Data
Oct. 7, 2009 (IS) 8852

(51) Int. Cl. C40B 30/04; G06F 19/00; G01N 33/566; C40B 40/06; C12Q 1/68; G01N 33/573

(52) U.S. Cl. 506/9; 435/6.11; 435/7.4; 436/501; 506/16; 702/20

(57) ABSTRACT

The invention relates to procedures and methods of determining a susceptibility to certain vascular conditions, including Atrial Fibrillation, Atrial Flutter and Stroke, by assessing the presence or absence of alleles at polymorphic markers found to be associated with these conditions. The invention further relates to kits encompassing reagents for assessing such markers, and diagnostic methods, uses and procedures for utilizing such markers.

### INTRODUCTION

[0001] Genetic risk is conferred by subtle differences in the genome among individuals in a population. Variations in the human genome are most frequently due to single nucleotide polymorphisms (SNPs), although other variations are also important. SNPs are located on average every 1000 base pairs in the human genome. Accordingly, a typical human gene containing 250,000 base pairs may contain 250 different SNPs. Only a minor number of SNPs are located in exons and alter the amino acid sequence of the protein encoded by the gene. Most SNPs may have little or no effect on gene function, while others may alter transcription, splicing, translation, or stability of the mRNA encoded by the gene. Additional genetic polymorphisms in the human genome are caused by insertions, deletions, translocations or inversion of either short or long stretches of DNA. Genetic polymorphisms conferring disease risk may directly alter the amino acid sequence of proteins, may increase the amount of protein produced from the gene, or may decrease the amount of protein produced by the gene.

[0002] As genetic polymorphisms conferring risk of common diseases are uncovered, genetic testing for such risk factors is becoming increasingly important for clinical medicine. Examples are apolipoprotein E testing to identify genetic carriers of the apoE4 polymorphism in dementia patients for the differential diagnosis of Alzheimer's disease, and of Factor V Leiden testing for predisposition to deep venous thrombosis. More importantly, in the treatment of cancer, diagnosis of genetic variants in tumor cells is used for the selection of the most appropriate treatment regime for the individual patient. In breast cancer, genetic variation in estrogen receptor expression or heregulin type 2 (Her2) receptor tyrosine kinase expression determine if anti-estrogenic drugs (tamoxifen) or anti-Her2 antibody (Herceptin) will be incorporated into the treatment plan. In chronic myeloid leukemia (CML) diagnosis of the Philadelphia chromosome genetic translocation fusing the genes encoding the Bcr and Abl receptor tyrosine kinases indicates that Gleevec (STI571), a specific inhibitor of the Bcr-Abl kinase should be used for treatment of the cancer. For CML patients with such a genetic alteration, inhibition of the Bcr-Abl kinase leads to rapid elimination of the tumor cells and remission from leukemia. Furthermore, genetic testing services are now available, providing individuals with information about their disease risk based on the discovery that certain SNPs have been associated with risk of many of the common diseases.

[0003] The electrocardiogram (ECG) is a valuable tool in the assessment of the cardiac conduction system. The measurements routinely obtained with ECG include heart rate (HR), PR interval, QRS duration and the QT interval. These variables are indicative of the function of the conduction system and provide important prognostic information.

[0004] A strong correlation between elevated HR and cardiovascular morbidity and mortality has been reported in numerous studies (Palatini, P. & Julius, S. Clin Exp Hypertens 26:637-44 (2004); Bjornsson, S. et al., Laeknabladid 21-7 (1993)). This relationship has not only been demonstrated in patients with cardiovascular diseases (CVD) including hypertension and left ventricular dysfunction but also in the general population (Palatini, P. & Julius, S. Clin Exp Hypertens 26:637-44 (2004)). As an example, a significantly greater risk of sudden cardiac death (SCD) has been associated with resting HR higher than 75 beats per minute in men without history of CVD (Jouven, X. et al. N Engl J Med 352:1951-8 (2005)).

[0005] The PR interval and QRS complex are measures of electrical activation. The PR interval reflects the time required for the electrical impulse to travel from the atrial myocardium adjacent to the sinus node (SN), through the atrioventricular node (AVN), and to the Purkinje fibres (Saksena, S. & Camm. J A. Electrophysiological Disorders of the Heart (Elsevier Churchill Livingstone, Philadelphia (2004)). The QRS complex represents depolarization of the ventricles through the Purkinje system and ventricular myocardium (Saksena, S. & Camm. J A. Electrophysiological Disorders of the Heart (Elsevier Churchill Livingstone, Philadelphia (2004)). Delayed conduction in the respective segments of the conduction system, of any cause, results in prolongation of these parameters. Isolated prolongation of the PR interval has generally been perceived as a benign condition but was recently associated with increased risk of atrial fibrillation (AF), pacemaker (PM) implantation and mortality (Cheng. S. et al., JAMA 301:2571-7 (2009). Increased QRS duration, both in the presence and absence of bundle branch block (BBB), has long been associated with less survival (Hesse, B et al., Am J Med 110:253-9 (2001); Desai, A D et al. Am J Med 119:600-6 (2006)).

[0006] The QT interval reflects myocardial repolarization. Extremes of the QT interval duration are established risk factors of ventricular arrhythmias and SCD and include well known Mendelian long- and short-QT syndromes commonly due to rare mutations in ion channel genes. There is evidence for a substantial genetic contribution to the cardiac conduction system with a reported heritability for HR in the range of 29-77%, 34% for the PR interval and 30-40% for the QT interval (Newton-Cheh, C. et al., BMC Med Genet. 8 Suppl 1:S7 (2007); Hanson, B. et al., Am J Cariol. 63:606-9 (1989); Havlik, R J et al., J Electrocardio/13:45-8 (1980); Russell, M W et al. J Electrocardiol 30 Suppl:64-8 (1998); Li, J. et al. Ann Nonivvasive Electrocardiol 14:147-52 (2009)). Studies on the QRS duration have reported inconsistent results, ranging from no significant heritable component (Havlik, R J et al. J Electrocardiol 13:45-8 (1980); Russell, M W et al., J Electrocardiol 30 Suppl:64-8 (1998)) to 36-43% heritability (Li, J. et al., Ann Noninvasive Electrocardiol 14:147-52 (2009); Mutikainen, S. et al. Ann Nonivasive Electrocardiol 14:57-64 (2009)).

[0007] Several recent genome wide association studies (GWAS) have yielded associations between common sequence variants and ECG variables of which the QT interval has particularly been intensely studied. Variants at NOS1AP have shown the strongest association with the QT interval, identifying a previously unrecognized relationship between the nitric oxide synthase pathway and cardiac repolarization (Arking, D E et al. Nat Genet. 38:644-51 (2006)). Subsequently, association was observed between the NOS1AP variants and risk of SCD in white adults, demonstrating how associations with intermediate traits may not only uncover previously unknown biological mechanisms but also translate to clinical relevance (Kao, W H et al. Circulation 119:940-51 (2009)).

[0008] Many additional associations were recently reported by two large QT interval meta-analyses on individuals of European ancestry, including both novel associations and with variants in genes known to be involved in myocardial repolarization and Mendelian QT syndromes (Newton-Cheh, C. et al. Nat Genet. 41:399-406 (2009); Pfeufer, A. et al. Nat Genet. 41:407-14 (2009)). Additionally, a recent GWAS in two population based series recruited in Korea revealed two loci with genome-wide significant (GWS) association with HR (rs12731740 and rs12110693) (Cho, Y S et al. Nat Genet. 41:527-34 (2009)) and a study in a South Pacific islander population (Kosrae) showed suggestive association between the PR interval and common variations in SCN5A (rs7638909 and rs2070488) (Smith, J G et al. Heart Rhythm 6:634-41 (2009)). To our knowledge, the two latter associations have not been assessed in individuals of European origin.

[0009] Atrial fibrillation (AF) is an abnormal heart rhythm (cardiac arrhythmia) which involves the two small, upper heart chambers (the atria). Heart beats in a normal heart begin after electricity generated in the atria by the sinoatrial node spreads through the heart and causes contraction of the heart muscle and pumping of blood. In AF, the regular electrical impulses of the sinoatrial node are replaced by disorganized, rapid electrical impulses which result in irregular heart beat.

[0010] Atrial fibrillation is the most common cardiac arrhythmia. The risk of developing atrial fibrillation increases with age—AF affects four percent of individuals in their 80s. An individual may spontaneously alternate between AF and a normal rhythm (paroxysmal atrial fibrillation) or may continue with AF as the dominant cardiac rhythm without reversion to the normal rhythm (chronic atrial fibrillation). Atrial fibrillation is often asymptomatic, but may result in symptoms of palpitations, fainting, chest pain, or even heart failure. These symptoms are especially common when atrial fibrillation results in a heart rate which is either too fast or too slow. In addition, the erratic motion of the atria leads to blood stagnation (stasis) which increases the risk of blood clots that may travel from the heart to the brain and other areas. Thus, AF is an important risk factor for stroke, the most feared complication of atrial fibrillation.

[0011] The symptoms of atrial fibrillation may be treated with medications which slow the heart rate. Several medications as well as electrical cardioversion may be used to convert AF to a normal heart rhythm. Surgical and catheter-based therapies may also be used to prevent atrial fibrillation in certain individuals. People with AF are often given blood thinners such as warfarin to protect them from strokes.

[0012] Any patient with 2 or more identified episodes of atrial fibrillation is said to have recurrent atrial fibrillation. This is further classified into paroxysmal and persistent based on when the episode terminates without therapy. Atrial fibrillation is said to be paroxysmal when it terminates spontaneously within 7 days, most commonly within 24 hours. Persistent or chronic atrial fibrillation is AF established for more than seven days. Differentiation of paroxysmal from chronic or established AF is based on the history of recurrent episodes and the duration of the current episode of AF (Levy S., J Cardiovasc Electrophysiol. 8 Suppl, S78-82 (1998)).

[0013] Lone atrial fibrillation (LAF) is defined as atrial fibrillation in the absence of clinical or echocardiographic findings of cardiopulmonary disease.

[0014] Atrial fibrillation is usually accompanied by symptoms related to either the rapid heart rate or embolization. Rapid and irregular heart rates may be perceived as palpitations, exercise intolerance, and occasionally produce angina and congestive symptoms of shortness of breath or edema. Sometimes the arrhythmia will be identified with the onset of a stroke or a transient ischemic attack (TIA). It is not uncommon to identify atrial fibrillation on a routine physical examination or electrocardiogram (ECG/EKG), as it may be asymptomatic in some cases. Paroxysmal atrial fibrillation is the episodic occurrence of the arrhythmia and may be difficult to diagnose. Episodes may occur with sleep or with exercise, and their episodic nature may require prolonged ECG monitoring (e.g. a Holter monitor) for diagnosis.

[0015] Atrial fibrillation is diagnosed on an electrocardiogram, an investigation performed routinely whenever irregular heart beat is suspected. Characteristic findings include absence of P waves, unorganized electrical activity in their place and irregularity of R-R interval due to irregular conduction of impulses to the ventricles. If paroxysmal AF is suspected, episodes may be documented with the use of Holter monitoring (continuous ECG recording for 24 hours or longer).

[0016] While many cases of AF have no definite cause, it may be the result of various other problems (see below). Hence, renal function and electrolytes are routinely determined, as well as thyroid-stimulating hormone and a blood count. A chest X-ray is generally performed. In acute-onset AF associated with chest pain, cardiac troponins or other markers of damage to the heart muscle may be ordered. Coagulation studies (INR/aPTT) are usually performed, as anticoagulant medication may be commenced. A transesophageal echocardiogram may be indicated to identify any intracardiac thrombus (Fuster V., et al., Circulation; 104, 2118-2150 (2001)).

[0017] Atrial Flutter (AFI) is characterized by an abnormal fast heart rhythm in the atria. Patients who present with atrial flutter commonly also experience Atrial Fibrillation and vice versa (Waldo, A., Progr Cardiovasc Disease, 48:41-56 (2005)). Mechanistically and biologically, AF and AFI are thus likely to be highly related.

[0018] AF (and AFI) is linked to several cardiac causes, but may occur in otherwise normal hearts. Known associations include: High blood pressure, Mitral stenosis (e.g. due to rheumatic heart disease or mitrel valve prolapse), Mitral regurgitation, Heart surgery, Coronary artery disease, Hypertrophic cardiomyopathy, Excessive alcohol consumption (“binge drinking” or “holiday heart”), Hyperthyroidism, Hyperstimulation of the vagus nerve, usually by having large meals (“binge eating”), Lung pathology (such as pneumonia, lung cancer, pulmonary embolism, Sarcoidosis), Pericarditis, Intense emotional turmoil, and Congenital heart disease.

[0019] The normal electrical conduction system of the heart allows the impulse that is generated by the sinoatrial node (SA node) of the heart to be propagated to and stimulate the myocardium (muscle of the heart). When the myocardium is stimulated, it contracts. It is the ordered stimulation of the myocardium that allows efficient contraction of the heart, thereby allowing blood to be pumped to the body. In atrial fibrillation, the regular impulses produced by the sinus node to provide rhythmic contraction of the heart are overwhelmed by the rapid randomly generated discharges produced by larger areas of atrial tissue. An organized electrical impulse in the atrium produces atrial contraction; the lack of such an impulse, as in atrial fibrillation, produces stagnant blood flow, especially in the atrial appendage and predisposes to clotting. The dislodgement of a clot from the atrium results in an embolus, and the damage produced is related to where the circulation takes it. An embolus to the brain produces the most feared complication of atrial fibrillation, stroke, while an embolus may also lodge in the mesenteric circulation (the circulation supplying the abdominal organs) or digit, producing organ-specific damage.

[0020] Treatment of atrial fibrillation is directed by two main objectives: (i) prevent temporary circulatory instability; (ii) prevent stroke. The most common methods for achieving the former includes rate and rhythm control, while anticoagulation is usually the desired method for the latter (Prystowsky E. N., Am J Cardiol.; 85, 3D-11D (2000); van Walraven C, et al., Jama. 288, 2441-2448 (2002)). Common methods for rate control, i.e. for reducing heart rate to normal, include beta blockers (e.g., metotprolol), cardiac glycosides (e.g., digoxin) and calcium channel blockers (e.g., verapamil). All these medications work by slowing down the generation of pulses from the atria, and the conduction from the atria to the ventricles. Other drugs commonly used include quinidine, flecamide, propafenone, disopyramide, sotalol and amiodarone. Rhythm control can be achieved by electrical cardioversion, i.e. by applying DC electrical shock, or by chemical cardioversion, using drugs such as amiodarione, propafenone and flecamide.

[0021] Preventive measures for stroke include anticoagulants. Representative examples of anticoagulant agents are Dalteparin (e.g., Fragmin), Danaparoid (e.g., Orgaran), Enoxaparin (e.g., Lovenox), Heparin (various), Tinzaparin (e.g., Innohep), Warfarin (e.g., Coumadin). Some patients with lone atrial fibrillation are sometimes treated with aspirin or clopidogrel. There is evidence that aspirin and clopidogrel are effective when used together, but the combination is still inferior to warfarin (Connolly S., et al. Lancet; 367, 1903-1912 (2006)). (2) The new anticoagulant ximelagatran has been shown to prevent stroke with equal efficacy as warfarin, without the difficult monitoring process associated with warfarin and with possibly fewer adverse haemorrhagic events. Unfortunately, ximegalatran and other similar anticoagulant drugs (commonly referred to as direct thrombin inhibitors), have yet to be widely licensed.

[0022] Determining who should and should not receive anti-coagulation with warfarin is not straightforward. The CHADS2 score is the best validated method of determining risk of stroke (and therefore who should be anticoagulated). The UK NICE guidelines have instead opted for an algorithm approach. The underlying problem is that if a patient has a yearly risk of stroke that is less than 2%, then the risks associated with taking warfarin outweigh the risk of getting a stroke (Gage B. F. et al. Stroke 29, 1083-1091 (1998))

[0023] Atrial fibrillation can sometimes be controlled with treatment. The natural tendency of atrial fibrillation, however, is to become a chronic condition. Chronic AF leads to an increased risk of death. Patients with atrial fibrillation are at significantly increased chance of stroke.

[0024] Atrial fibrillation is common among older adults. In developed countries, the number of patients with atrial fibrillation is likely to increase during the next 50 years, due to the growing proportion of elderly individuals (Go A. S. et al., Jama., 285, 2370-2375 (2001))(3). In the Framingham study the lifetime risk for development of AF is 1 in 4 for men and women 40 years of age and older. Lifetime risks for AF are high (1 in 6). According to data from the National Hospital Discharge Survey (1996-2001) on cases that included AF as a primary discharge diagnosis found that 45% of the patients are male, and that the mean age for men was 66.8 years and 74.6 for women. The racial breakdown for admissions was found to be 71.2% white, 5.6% black, 2% other races, and 20% not specified. Furthermore, African American patients were, on average, much younger than other races. The incidence in men ranged from 20.58/100,000 persons per year for patients ages 15-44 years to 1203/100,000 persons per years for those ages 85 and older. From 1996-2001, hospitalizations with AF as the first listed diagnosis, has increased by 34%.

[0025] Stroke is a common and serious disease. Each year in the United States more than 600,000 individuals suffer a stroke and more than 160,000 die from stroke-related causes (Sacco, R. L. et al., Stroke 28, 1507-17 (1997)). Furthermore, over 300,000 individuals present with Transient Ischemic Attack, a mild form of stroke, every year in the US. In western countries stroke is the leading cause of severe disability and the third leading cause of death (Bonita, R., Lancet 339, 342-4 (1992)). The lifetime risk of those who reach the age of 40 exceeds 10%.

[0026] The clinical phenotype of stroke is complex but is broadly divided into ischemic (accounting for 80-90%) and hemorrhagic stroke (10-20%) (Caplan, L. R. Caplan's Stroke: A Clinical Approach, 1-556 (Butterworth-Heinemann, 2000)). Ischemic stroke is further subdivided into large vessel occlusive disease (referred to here as carotid stroke), usually due to atherosclerotic involvement of the common and internal carotid arteries, small vessel occlusive disease, thought to be a non-atherosclerotic narrowing of small end-arteries within the brain, and cardiogenic stroke due to blood clots arising from the heart usually on the background of atrial fibrillation or ischemic (atherosclerotic) heart disease (Adams, H. P., Jr. et al., Stroke 24, 35-41 (1993)). Therefore, it appears that stroke is not one disease but a heterogeneous group of disorders reflecting differences in the pathogenic mechanisms (Alberts, M. J. Genetics of Cerebrovascular Disease, 386 (Futura Publishing Company, Inc., New York, 1999); Hassan, A. & Markus, H. S. Brain 123, 1784-812 (2000)). However, all forms of stroke share risk factors such as hypertension, diabetes, hyperlipidemia, and smoking (Sacco, R. L. et al., Stroke 28, 1507-17 (1997); Leys, D. et al., J. Neurol. 249, 507-17 (2002)). Family history of stroke is also an independent risk factor suggesting the existence of genetic factors that may interact with environmental factors (Hassan, A. & Markus, H. S. Brain 123, 1784-812 (2000); Brass, L. M. & Alberts, M. J. Baillieres Clin. Neurol. 4, 221-45 (1995)).

[0027] The genetic determinants of the common forms of stroke are still largely unknown. There are examples of mutations in specific genes that cause rare Mendelian forms of stroke such as the Notch3 gene in CADASIL (cerebral autosomal dominant arteriopathy with subcortical infarctions and leukoencephalopathy) (Tournier-Lasserve, E. et al., Nat. Genet. 3, 256-9 (1993); Joutel, A. et al., Nature 383, 707-10 (1996)), Cystatin C in the Icelandic type of hereditary cerebral hemorrhage with amyloidosis (Palsdottir, A. et al., Lancet 2, 603-4 (1988)), APP in the Dutch type of hereditary cerebral hemorrhage (Levy, E. et al., Science 248, 1124-6 (1990)) and the KRIT1 gene in patients with hereditary cavernous angioma (Gunel, M. et al., Proc. Natl. Acad. Sci. USA 92, 6620-4 (1995); Sahoo, T. et al., Hum. Mol. Genet. 8, 2325-33 (1999)). None of these rare forms of stroke occur on the background of atherosclerosis, and therefore, the corresponding genes are not likely to play roles in the common forms of stroke which most often occur with atherosclerosis.

[0028] It is very important for the health care system to develop strategies to prevent stroke. Once a stroke happens, irreversible cell death occurs in a significant portion of the brain supplied by the blood vessel affected by the stroke. Unfortunately, the neurons that die cannot be revived or replaced from a stem cell population. Therefore, there is a need to prevent strokes from happening in the first place. Although we already know of certain clinical risk factors that increase stroke risk (listed above), there is an unmet medical need to define the genetic factors involved in stroke to more precisely define stroke risk. Further, if predisposing alleles are common in the general population and the specificity of predicting a disease based on their presence is low, additional loci such as protective loci are needed for meaningful prediction of disposition of the disease state. There is also a great need for therapeutic agents for preventing the first stroke or further strokes in individuals who have suffered a previous stroke or transient ischemic attack.

[0029] AF is an independent risk factor for stroke, increasing risk about 5-fold. The risk for stroke attributable to AF increases with age. AF is responsible for about 15-20% of all strokes. AF is also an independent risk factor for stroke recurrence and stroke severity. A recent report showed people who had AF and were not treated with anticoagulants had a 2.1-fold increase in risk for recurrent stroke and a 2.4 fold increase in risk for recurrent severe stroke. People who have stroke caused by AF have been reported as 2.23 times more likely to be bedridden compared to those who have strokes from other causes.

[0030] There is a need for an understanding of the susceptibility factors leading to increased predisposition to abnormal ECG measures, and their effect on cardiac arrhythmias and stroke. Identification of such variants can, for example, be useful for assessing which individuals are at particularly high risk of these disorders. Furthermore, preventive treatment and appropriate monitoring can be performed for individuals carrying one or more at-risk variants. Finally, identification of at-risk variants can lead to the identification of new targets for drug therapy, as well as the development of novel therapeutic measures.

### SUMMARY OF THE INVENTION

[0031] It has been discovered that certain genetic variants are correlated with electrocardiogram (ECG) measures and risk of disease states that are related with abnormal ECG measures. Such genetic variants are useful in a range of applications, as described further herein, including various diagnostic applications for determining risk of abnormal ECG measures and diseases such as Atrial Fibrillation, Atrial Flutter and Stroke.

[0032] In a first aspect, the invention provides a method of determining a susceptibility to a vascular condition selected from the group consisting of: an abnormal electrocardiogram measure, Atrial Fibrillation, Atrial Flutter, and Stroke, in a human individual, the method comprising: obtaining sequence data about a human individual identifying at least one allele of at least one polymorphic marker, wherein different alleles of the at least one polymorphic marker are associated with different susceptibilities to the condition in humans, and determining a susceptibility to the condition from the sequence data, wherein the at least one polymorphic marker is selected from the group consisting of rs3825214, rs6795970, rs3807989, rs7660702, rs132311, rs1733724 and rs365990, and markers in linkage disequilibrium therewith.

[0033] Another aspect relates to a method of determining a susceptibility to a vascular condition selected from the group consisting of: an abnormal electrocardiogram measure, Atrial Fibrillation, Atrial Flutter, and Stroke, in a human individual, the method comprising analyzing sequence data about a human individual identifying at least one allele of at least one polymorphic marker, wherein different alleles of the at least one polymorphic marker are associated with different susceptibilities to the condition in humans, and determining a susceptibility to the condition from the sequence data,

wherein the at least one polymorphic marker is selected from the group consisting of rs3825214, rs6795970, rs3807989, rs7660702, rs132311, rs1733724 and rs365990, and markers in linkage disequilibrium therewith.

[0034] In another aspect, the method comprises determining the presence or absence of at least one allele of at least one polymorphic marker in a nucleic acid sample obtained from the individual, or in a genotype dataset from the subject, wherein the at least one polymorphic marker is selected from the group consisting of rs3825214, rs6795970, rs3807989, rs7660702, rs132311, rs1733724 and rs365990, and markers in linkage disequilibrium therewith, and wherein determination of the presence of the at least one allele is indicative of a susceptibility to the condition. In certain embodiments, the allele is an allele that confers an increased risk of the condition (an at-risk allele). In such embodiments, determination of the presence of the allele is indicative of increased susceptibility to the condition, whereas determination of the absence of the allele is indicative of the subject not increased susceptibility to the condition that is conferred by the allele.

[0035] The invention further relates to a method of assessing a susceptibility to a vascular condition selected from the group consisting of: an abnormal electrocardiogram measure, Atrial Fibrillation, Atrial Flutter, and Stroke, in a human subject, comprising (i) obtaining sequence information about the subject for at least one polymorphic marker selected from the group consisting of rs3825214, rs6795970, rs3807989, rs7660702, rs132311, rs1733724 and rs365990, and markers in linkage disequilibrium therewith, wherein different alleles of the at least one polymorphic marker are associated with different susceptibilities to the condition in humans; and (ii) identifying the presence or absence of at least one allele in the at least one polymorphic marker that correlates with increased occurrence of the condition in humans; wherein determination of the presence of the at least one allele identifies the subject as having elevated susceptibility to the condition, and wherein determination of the absence of the at least one allele identifies the subject as not having the elevated susceptibility.

[0036] The invention also provides a method of assessing a subject's risk of a vascular condition selected from the group consisting of: an abnormal electrocardiogram measure, Atrial Fibrillation, Atrial Flutter, and Stroke, the method comprising: obtaining sequence information about the individual identifying at least one allele of at least one polymorphic marker in the genome of the individual; representing the sequence information as digital genetic profile data; transforming the digital genetic profile data to generate a risk assessment report of the condition for the subject; and displaying the risk assessment report on an output device; wherein the at least one polymorphic marker comprises at least one marker selected from the group consisting of rs3825214, rs6795970, rs3807989, rs7660702, rs132311, rs1733724 and rs365990, and markers in linkage disequilibrium therewith.

[0037] The digital genetic profile data suitably comprises data about at least one polymorphic marker in the genome of the subject, such as allele counts for at least one allele of the marker, or data identifying both alleles of the marker in the genome of the individual.

[0038] The genetic profile data is suitably transformed into a risk measure using a computer processor. The risk assessment report may be in any suitable format for delivering risk assessment information about the subject. In certain embodiments, the report comprises at least one identifier for the subject and a numerical value for at least one risk measure for the individual for at least one polymorphic marker.

[0039] Further provided is a method of determining a susceptibility to a vascular condition selected from the group consisting of: an abnormal electrocardiogram measure, Atrial Fibrillation, Atrial Flutter, and Stroke, the method comprising: obtaining sequence data about a human individual identifying at least one allele of at least one polymorphic marker, wherein different alleles of the at least one polymorphic marker are associated with different susceptibilities to the condition in humans; and determining a susceptibility to the condition from the sequence data; wherein the at least one polymorphic marker is a marker associated with a gene selected from the group consisting of: the human TBX5 gene, the human SCN10A gene, the human CAV1 gene, the human ARHGAP24 gene, the human CDKN1A gene and the human MYH6 gene.

[0040] In certain embodiments, the at least one marker associated with the human TBX5 gene is selected from the group consisting of rs3825214, and markers in linkage disequilibrium therewith; the at least one marker associated with the human SCN10A gene is selected from the group consisting of rs6795970, and markers in linkage disequilibrium therewith; the at least one marker associated with the human CAVI gene is selected from the group consisting of rs3807989, and markers in linkage disequilibrium therewith; the at least one marker associated with the human ARHGAP24 gene is selected from the group consisting of rs7660702, and markers in linkage disequilibrium therewith; the at least one marker associated with the human CDKN1A gene is selected from the group consisting of rs132311, and markers in linkage disequilibrium therewith; and the at least one marker associated with the human MYH6 gene is selected from the group consisting of rs365990, and markers in linkage disequilibrium therewith.

[0041] The invention also provides a method of identification of a marker for use in assessing susceptibility to a vascular condition selected from the group consisting of: an abnormal electrocardiogram measure, Atrial Fibrillation, Atrial Flutter, and Stroke, in human individuals, the method comprising
[0042] a. identifying at least one polymorphic marker in linkage disequilibrium with at least one marker selected from the group consisting of rs3825214, rs6795970, rs3807989, rs7660702, rs132311, rs1733724 and rs365990;
[0043] b. obtaining sequence information about the at least one polymorphic marker in a group of individuals diagnosed with the condition; and
[0044] c. obtaining sequence information about the at least one polymorphic marker in a group of control individuals;
   wherein determination of a significant difference in frequency of at least one allele in the at least one polymorphism in individuals diagnosed with the condition as compared with the frequency of the at least one allele in the control group is indicative of the at least one polymorphism being useful for assessing susceptibility to the condition. In certain embodiments, an increase in frequency of the at least one allele in the at least one polymorphism in individuals diagnosed with the condition, as compared with the frequency of the at least one allele in the control group, is indicative of the at least one polymorphism being useful for assessing increased susceptibility to the condition; and a decrease in frequency of the at least one allele in the at least one polymorphism in individuals diagnosed with the condition, as compared with the frequency of the at least one allele in the control group, is indicative of the at least one polymorphism being useful for assessing decreased susceptibility to, or protection against, the condition.

[0045] Disease management methods that are made possible by the present invention also include a method of predicting prognosis of an individual diagnosed with a vascular condition selected from the group consisting of: an abnormal electrocardiogram measure, Atrial Fibrillation, Atrial Flutter, and Stroke, the method comprising: obtaining sequence data about a human individual identifying at least one allele of at least one polymorphic marker selected from the group consisting of rs3825214, rs6795970, rs3807989, rs7660702, rs132311, rs1733724 and rs365990, and markers in linkage disequilibrium therewith, wherein different alleles of the at least one polymorphic marker are associated with different susceptibilities to the conditions in humans, and predicting prognosis of the condition from the sequence data. For example, determination of the presence of an allele that correlates with an abnormal ECG measure or confers increased risk of Atrial Fibrillation, Atrial Flutter and/or Stroke, may be predictive of a more severe prognosis of disease. For such individuals, a more aggressive course of clinical treatment or preventive measure may be appropriate, as described further herein.

[0046] The invention also provides a method for selecting a clinical course of therapy to treat a subject who is at risk for developing a vascular condition selected from the group consisting of: an abnormal electrocardiogram measure, Atrial Fibrillation, Atrial Flutter, and Stroke, comprising the steps of: (a) obtaining sequence data about a human subject identifying at least one allele of at least one polymorphic marker, wherein different alleles of the at least one polymorphic marker are associated with different susceptibilities to the condition in humans; (b) transforming the sequence data into a risk measure of the condition for the subject; (c) selecting a clinical course of therapy for treatment of a subject who is determined to be at an increased risk for developing the condition; wherein the at least one polymorphic marker is selected from the group consisting of rs3825214, rs6795970, rs3807989, rs7660702, rs132311, rs1733724 and rs365990, and markers in linkage disequilibrium therewith.

[0047] The invention also provides methods for assessing response to therapeutic agents. In one such aspect, a method of assessing probability of response of a human individual to a therapeutic agent for preventing, treating and/or ameliorating symptoms associated with a vascular condition selected from the group consisting of: an abnormal electrocardiogram measure, Atrial Fibrillation, Atrial Flutter, and Stroke, is provided, the method comprising the steps of: obtaining sequence data about a human individual identifying at least one allele of at least one polymorphic marker selected from the group consisting of rs3825214, rs6795970, rs3807989, rs7660702, rs132311, rs1733724 and rs365990, and markers in linkage disequilibrium therewith, wherein different alleles of the at least one polymorphic marker are associated with different probabilities of response to the therapeutic agent in humans; and determining the probability of a positive response to the therapeutic agent from the sequence data.

[0048] The methods of the invention, as described herein, may suitably be performed in connection with determination of biomarkers. In other words, the methods as described herein may comprise a further step of assaying or determining at least one biomarker. The biomarker may in a general sense be any suitable biomarker for any electrocardiogram measure, or the biomarker may be predictive of, or associated with, Atrial Fibrillation, Atrial Flutter and/or stroke.

[0049] The invention also provides kits. In one such aspect, the invention relates to a kit for assessing susceptibility to a vascular condition selected from the group consisting of: an abnormal electrocardiogram measure, Atrial Fibrillation, Atrial Flutter, and Stroke, the kit comprising: reagents for selectively detecting at least one allele of at least one polymorphic marker in the genome of the individual, wherein the polymorphic marker is selected from the group consisting of rs3825214, rs6795970, rs3807989, rs7660702, rs132311, rs1733724 and rs365990, and markers in linkage disequilibrium therewith; and a collection of data comprising correlation data between the at least one polymorphism and susceptibility to the condition.

[0050] It may also be convenient to use particular nucleotide probes for manufacturing diagnostic reagents as described herein. A further aspect of the invention thus relates to the use of an oligonucleotide probe in the manufacture of a diagnostic reagent for diagnosing and/or assessing a susceptibility to a vascular condition selected from the group consisting of: an abnormal electrocardiogram measure, Atrial Fibrillation, Atrial Flutter, and Stroke, wherein the probe is capable of hybridizing to a segment of a nucleic acid whose nucleotide sequence is given by any one of SEQ ID NO:1-3623, and wherein the segment is 15-500 nucleotides in length. In one embodiment, the segment is 15-400 nucleotides in length. In another embodiment, the segment is 15-180 nucleotides in length.

[0051] Yet another aspect of the invention relates to the use of the diagnostic markers described hererin for the selection of individuals to be treated with at least one therapeutic agent. One such aspect relates to the use of an agent for treating a vascular condition selected from the group consisting of: an abnormal electrocardiogram measure, Atrial Fibrillation, Atrial Flutter, and Stroke in a human individual that has been tested for the presence of at least one allele of at least one polymorphic marker selected from the group consisting of rs3825214, rs6795970, rs3807989, rs7660702, rs132311, rs1733724 and rs365990, and markers in linkage disequilibrium therewith. In one embodiment, an individual who is determined to have at least one copy of the allele that correlates with increased risk of Atrial Fibrillation, Atrial Flutter and Stroke, or an allele that correlates with an abnormal electrocardiogram measure, is selected for treatment with the therapeutic agent.

[0052] The invention may implemented on computerized systems. One such aspect relates to a computer-readable medium having computer executable instructions for determining susceptibility to a vascular condition selected from the group consisting of: an abnormal electrocardiogram measure, Atrial Fibrillation, Atrial Flutter, and Stroke, the computer readable medium comprising (i) data indicative of at least one polymorphic marker; and (ii) a routine stored on the computer readable medium and adapted to be executed by a processor to determine risk of developing the condition for the at least one polymorphic marker; wherein the at least one polymorphic marker is selected from the group consisting of rs3825214, rs6795970, rs3807989, rs7660702, rs132311, rs1733724 and rs365990, and markers in linkage disequilibrium therewith.

[0053] Another computer-implemented aspect relates to a system for generating a risk assessment report for a vascular condition selected from the group consisting of: an abnormal electrocardiogram measure, Atrial Fibrillation, Atrial Flutter, and Stroke, the system comprising: (a) a memory configured to store sequence data for at least one human subject, the sequence data identifying at least one allele of at least one polymorphic marker, wherein different alleles of the marker are associated with different susceptibilities to the condition in humans; and (b) a processor configured to: (i) receive information identifying the at least one allele of the at least one polymorphic marker; (ii) transform said information into a risk measure of the condition for the human subject; (iii) generate a risk assessment report based on the received information, and (iv) provide the risk assessment report on an output device, wherein the at least one polymorphic marker is selected from the group consisting of rs3825214, rs6795970, rs3807989, rs7660702, rs132311, rs1733724 and rs365990, and markers in linkage disequilibrium therewith. The output device may be any suitable device for providing a risk assessment report. The device is in certain embodiments a printer capable of printing the report: The device may also be a server, optionally containing access control, such that the report may be accessed via a web interface.

[0054] Yet another computerized aspect relates to an apparatus for determining a genetic indicator for a vascular condition selected from the group consisting of: an abnormal electrocardiogram measure, Atrial Fibrillation, Atrial Flutter, and Stroke, in a human individual, comprising (a) a processor; and (b) a computer readable memory having computer executable instructions adapted to be executed on the processor to analyze marker and/or haplotype information for at least one human individual with respect to at least one polymorphic marker selected from the group consisting of rs3825214, rs6795970, rs3807989, rs7660702, rs132311, rs1733724 and rs365990, and markers in linkage disequilibrium therewith, and generate an output based on the marker or haplotype information, wherein the output comprises a measure of susceptibility of the at least one marker or haplotype as a genetic indicator of the condition for the human individual.

[0055] The abnormal electrocardiogram measures in the various embodiments of the invention may suitably be selected from the group consisting of: an increased and/or decreased QRS interval, an increased and/or decreased PR interval, an increased and/or decreased QT interval, sick sinus syndrome and an increased and/or decreased heart rate. In certain embodiments, the abnormal electrocardiogram measure is selected from the group consisting of: an increased QRS interval, an increased PR interval, an increased QT interval, sick sinus syndrome and an increased heart rate.

[0056] In certain embodiments of the invention, the vascular condition is Atrial Fibrillation.

[0057] It should be understood that all combinations of features described herein are contemplated, even if the combination of feature is not specifically found in the same sentence or paragraph herein. This includes for example particular the use of all markers disclosed herein, alone or in combination, for analysis individually or in haplotypes, in all aspects of the invention as described herein.

### BRIEF DESCRIPTION OF THE DRAWINGS

[0058] The foregoing and other objects, features and advantages of the invention will be apparent from the following more particular description of preferred embodiments of the invention.

[0059] FIG. 1 provides a diagram illustrating a computer-implemented system utilizing risk variants as described herein.

### DETAILED DESCRIPTION

### Definitions

[0060] Unless otherwise indicated, nucleic acid sequences are written left to right in a 5′ to 3′ orientation. Numeric ranges recited within the specification are inclusive of the numbers defining the range and include each integer or any non-integer fraction within the defined range. Unless defined otherwise, all technical and scientific terms used herein have the same meaning as commonly understood by the ordinary person skilled in the art to which the invention pertains.

[0061] The following terms shall, in the present context, have the meaning as indicated:

[0062] A “polymorphic marker”, sometime referred to as a “marker”, as described herein, refers to a genomic polymorphic site. Each polymorphic marker has at least two sequence variations characteristic of particular alleles at the polymorphic site. Thus, genetic association to a polymorphic marker implies that there is association to at least one specific allele of that particular polymorphic marker. The marker can comprise any allele of any variant type found in the genome, including SNPs, mini- or microsatellites, translocations and copy number variations (insertions, deletions, duplications). Polymorphic markers can be of any measurable frequency in the population. For mapping of disease genes, polymorphic markers with population frequency higher than 5-10% are in general most useful. However, polymorphic markers may also have lower population frequencies, such as 1-5% frequency, or even lower frequency, in particular copy number variations (CNVs). The term shall, in the present context, be taken to include polymorphic markers with any population frequency.

[0063] An “allele” refers to the nucleotide sequence of a given locus (position) on a chromosome. A polymorphic marker allele thus refers to the composition (i.e., sequence) of the marker on a chromosome. Genomic DNA from an individual contains two alleles (e.g., allele-specific sequences) for any given polymorphic marker, representative of each copy of the marker on each chromosome. Sequence codes for nucleotides used herein are: A=1, C=2, G=3, T=4. For microsatellite alleles, the CEPH sample (Centre d'Etudes du Polymorphisme Humain, genomics repository, CEPH sample 1347-O₂) is used as a reference, the shorter allele of each microsatellite in this sample is set as 0 and all other alleles in other samples are numbered in relation to this reference. Thus, e.g., allele 1 is 1 bp longer than the shorter allele in the CEPH sample, allele 2 is 2 bp longer than the shorter allele in the CEPH sample, allele 3 is 3 bp longer than the lower allele in the CEPH sample, etc., and allele-1 is 1 bp shorter than the shorter allele in the CEPH sample, allele-2 is 2 bp shorter than the shorter allele in the CEPH sample, etc.

[0064] Sequence conucleotide ambiguity as described herein is as proposed by IUPAC-IUB. These codes are compatible with the codes used by the EMBL, GenBank, and PIR databases.

| IUB code | Meaning |
|---|---|
| A | Adenosine |
| C | Cytidine |
| G | Guanine |
| T | Thymidine |
| R | G or A |
| Y | T or C |
| K | G or T |
| M | A or C |
| S | G or C |
| W | A or T |
| B | C, G or T |
| D | A, G or T |
| H | A, C or T |
| V | A, C or G |
| N | A, C, G or T (Any base) |

[0065] A nucleotide position at which more than one sequence is possible in a population (either a natural population or a synthetic population, e.g., a library of synthetic molecules) is referred to herein as a “polymorphic site”.

[0066] A “Single Nucleotide Polymorphism” or “SNP” is a DNA sequence variation occurring when a single nucleotide at a specific location in the genome differs between members of a species or between paired chromosomes in an individual. Most SNP polymorphisms have two alleles. Each individual is in this instance either homozygous for one allele of the polymorphism (i.e. both chromosomal copies of the individual have the same nucleotide at the SNP location), or the individual is heterozygous (i.e. the two sister chromosomes of the individual contain different nucleotides). The SNP nomenclature as reported herein refers to the official Reference SNP (rs) ID identification tag as assigned to each unique SNP by the National Center for Biotechnological Information (NCBI).

[0067] A “variant”, as described herein, refers to a segment of DNA that differs from the reference DNA. A “marker” or a “polymorphic marker”, as defined herein, is a variant. Alleles that differ from the reference are referred to as “variant” alleles.

[0068] A “microsatellite” is a polymorphic marker that has multiple small repeats of bases that are 2-8 nucleotides in length (such as CA repeats) at a particular site, in which the number of repeat lengths varies in the general population. An “indel” is a common form of polymorphism comprising a small insertion or deletion that is typically only a few nucleotides long.

[0069] A “haplotype,” as described herein, refers to a segment of genomic DNA that is characterized by a specific combination of alleles arranged along the segment. For diploid organisms such as humans, a haplotype comprises one member of the pair of alleles for each polymorphic marker or locus along the segment. In a certain embodiment, the haplotype can comprise two or more alleles, three or more alleles, four or more alleles, or five or more alleles. Haplotypes are described herein in the context of the marker name and the allele of the marker in that haplotype, e.g., “3 rs3825214” refers to the 3 allele of marker rs3825214 being in the haplotype, and is equivalent to “rs3825214 allele 3”. Furthermore, allelic codes in haplotypes are as for individual markers, i.e. 1=A, 2=C, 3=G and 4=T.

[0070] The term “susceptibility”, as described herein, refers to the proneness of an individual towards the development of a certain state (e.g., a certain trait, phenotype or disease), or towards being less able to resist a particular state than the average individual. The term encompasses both increased susceptibility and decreased susceptibility. Thus, particular alleles at polymorphic markers and/or haplotypes of the invention as described herein may be characteristic of increased susceptibility (i.e., increased risk) of disease, as characterized by a relative risk (RR) or odds ratio (OR) of greater than one for the particular allele or haplotype. Alternatively, the markers and/or haplotypes of the invention are characteristic of decreased susceptibility (i.e., decreased risk) of disease, as characterized by a relative risk of less than one.

[0071] The term “and/or” shall in the present context be understood to indicate that either or both of the items connected by it are involved. In other words, the term herein shall be taken to mean “one or the other or both”.

[0072] The term “look-up table”, as described herein, is a table that correlates one form of data to another form, or one or more forms of data to a predicted outcome to which the data is relevant, such as phenotype or trait. For example, a look-up table can comprise a correlation between allelic data for at least one polymorphic marker and a particular trait or phenotype, such as a particular disease diagnosis, that an individual who comprises the particular allelic data is likely to display, or is more likely to display than individuals who do not comprise the particular allelic data. Look-up tables can be multidimensional, i.e. they can contain information about multiple alleles for single markers simultaneously, or the can contain information about multiple markers, and they may also comprise other factors, such as particulars about diseases diagnoses, racial information, biomarkers, biochemical measurements, therapeutic methods or drugs, etc.

[0073] A “computer-readable medium”, is an information storage medium that can be accessed by a computer using a commercially available or custom-made interface. Exemplary computer-readable media include memory (e.g., RAM, ROM, flash memory, etc.), optical storage media (e.g., CD-ROM), magnetic storage media (e.g., computer hard drives, floppy disks, etc.), punch cards, or other commercially available media. Information may be transferred between a system of interest and a medium, between computers, or between computers and the computer-readable medium for storage or access of stored information. Such transmission can be electrical, or by other available methods, such as IR links, wireless connections, etc.

[0074] A “nucleic acid sample” as described herein, refers to a sample obtained from an individual that contains nucleic acid (DNA or RNA). In certain embodiments, i.e. the detection of specific polymorphic markers and/or haplotypes, the nucleic acid sample comprises genomic DNA. Such a nucleic acid sample can be obtained from any source that contains genomic DNA, including a blood sample, sample of amniotic fluid, sample of cerebrospinal fluid, or tissue sample from skin, muscle, buccal or conjunctival mucosa, placenta, gastrointestinal tract or other organs.

[0075] The term “abnormal electrocardiogram measure”, as described herein, refers to an electrocardiogram measure that is outside the normal range of the measure, as determined by the skilled artisan (e.g., a clinician). For example, an elevated heart rate, an increased QT interval, an increased QRS interval and an increased PT interval are examples of abnormal electrocardiogram measure. The variants described herein are correlated with electrocardiogram measures, such that a particular allele at particular SNPs are correlated with an increase in the measure, e.g., an increased interval or heart rate.

[0076] The term “antisense agent” or “antisense oligonucleotide” refers, as described herein, to molecules, or compositions comprising molecules, which include a sequence of purine an pyrimidine heterocyclic bases, supported by a backbone, which are effective to hydrogen bond to a corresponding contiguous bases in a target nucleic acid sequence. The backbone is composed of subunit backbone moieties supporting the purine and pyrimidine heterocyclic bases at positions which allow such hydrogen bonding. These backbone moieties are cyclic moieties of 5 to 7 atoms in size, linked together by phosphorous-containing linkage units of one to three atoms in length. In certain preferred embodiments, the antisense agent comprises an oligonucleotide molecule.

[0077] The term “LD Block CO₃”, as described herein, refers to the Linkage Disequilibrium (LD) block on Chromosome 3 between markers rs6599240 and rs10212338, corresponding to position 38,713,721-38,787,654 of NCBI (National Center for Biotechnology Information) Build 36.

[0078] The term “LD Block C04”, as described herein, refers to the Linkage Disequilibrium (LD) block on Chromosome 4 between markers rs7698203 and rs7693640, corresponding to position 86,823,753-86,942,405 of NCBI (National Center for Biotechnology Information) Build 36.

[0079] The term “LD Block C06”, as described herein, refers to the Linkage Disequilibrium (LD) block on Chromosome 6 between markers rs6457931 and rs7762245, corresponding to position 36,721,790-36,824,207 of NCBI (National Center for Biotechnology Information) Build 36.

[0080] The term “LD Block C07”, as described herein, refers to the Linkage Disequilibrium (LD) block on Chromosome 7 between markers rs2157799 and rs6978354, corresponding to position 115,791,226-116,013,658 of NCBI (National Center for Biotechnology Information) Build 36.

[0081] The term “LD Block C10”, as described herein, refers to the Linkage Disequilibrium (LD) block on Chromosome 10 between markers rs1149782 and rs1733724, corresponding to position 53,808,502-53,893,983 of NCBI (National Center for Biotechnology Information) Build 36.

[0082] The term “LD Block C12”, as described herein, refers to the Linkage Disequilibrium (LD) block on Chromosome 12 between markers rs6489952 and rs17731569, corresponding to position 113,243,156-113,312,090 of NCBI (National Center for Biotechnology Information) Build 36.

[0083] The term “LD Block C14”, as described herein, refers to the Linkage Disequilibrium (LD) block on Chromosome 14 between markers rs3811178 and rs2754163, corresponding to position 22,915,084-22,967,347 of NCBI (National Center for Biotechnology Information) Build 36.

### Assessment for Markers and Haplotypes

[0084] The genomic sequence within populations is not identical when individuals are compared. Rather, the genome exhibits sequence variability between individuals at many locations in the genome. Such variations in sequence are commonly referred to as polymorphisms, and there are many such sites within each genome. For example, the human genome exhibits sequence variations which occur on average every 500 base pairs. The most common sequence variant consists of base variations at a single base position in the genome, and such sequence variants, or polymorphisms, are commonly called Single Nucleotide Polymorphisms (“SNPs”). These SNPs are believed to have occurred in a single mutational event, and therefore there are usually two possible alleles possible at each SNPsite; the original allele and the mutated allele. Due to natural genetic drift and possibly also selective pressure, the original mutation has resulted in a polymorphism characterized by a particular frequency of its alleles in any given population. Many other types of sequence variants are found in the human genome, including mini- and microsatellites, and insertions, deletions and inversions (also called copy number variations (CNVs)). A polymorphic microsatellite has multiple small repeats of bases (such as CA repeats, TG on the complimentary strand) at a particular site in which the number of repeat lengths varies in the general population. In general terms, each version of the sequence with respect to the polymorphic site represents a specific allele of the polymorphic site. These sequence variants can all be referred to as polymorphisms, occurring at specific polymorphic sites characteristic of the sequence variant in question. In general, polymorphisms can comprise any number of specific alleles within the population, although each human individual has two alleles at each polymorphic site—one maternal and one paternal allele. Thus in one embodiment of the invention, the polymorphism is characterized by the presence of two or more alleles in any given population. In another embodiment, the polymorphism is characterized by the presence of three or more alleles in a population. In other embodiments, the polymorphism is characterized by four or more alleles, five or more alleles, six or more alleles, seven or more alleles, nine or more alleles, or ten or more alleles. All such polymorphisms can be utilized in the methods and kits of the present invention, and are thus within the scope of the invention.

[0085] Due to their abundance, SNPs account for a majority of sequence variation in the human genome. Over 6 million human SNPs have been validated to date (http://www.ncbi.nlm.nih.gov/projects/SNP/snp_summary.cgi). However, CNVs are receiving increased attention. These large-scale polymorphisms (typically 1 kb or larger) account for polymorphic variation affecting a substantial proportion of the assembled human genome; known CNVs covery over 15% of the human genome sequence (Estivill, X Armengol; L., PloS Genetics 3:1787-99 (2007); http://projects.tcag.ca/variation/). Most of these polymorphisms are however very rare, and on average affect only a fraction of the genomic sequence of each individual. CNVs are known to affect gene expression, phenotypic variation and adaptation by disrupting gene dosage, and are also known to cause disease (microdeletion and microduplication disorders) and confer risk of common complex diseases, including HIV-1 infection and glomerulonephritis (Redon, R., et al. Nature 23:444-454 (2006)). It is thus possible that either previously described or unknown CNVs represent causative variants in linkage disequilibrium with the disease-associated markers described herein. Methods for detecting CNVs include comparative genomic hybridization (CGH) and genotyping, including use of genotyping arrays, as described by Carter (Nature Genetics 39:S16-S21 (2007)). The Database of Genomic Variants (http://projects.tcag.ca/variation/) contains updated information about the location, type and size of described CNVs. The database currently contains data for over 21,000 CNVs.

[0086] In some instances, reference is made to different alleles at a polymorphic site without choosing a reference allele. Alternatively, a reference sequence can be referred to for a particular polymorphic site. The reference allele is sometimes referred to as the “wild-type” allele and it usually is chosen as either the first sequenced allele or as the allele from a “non-affected” individual (e.g., an individual that does not display a trait or disease phenotype).

[0087] Alleles for SNP markers as referred to herein refer to the bases A, C, G or T as they occur at the polymorphic site. The allele codes for SNPs used herein are as follows: 1=A, 2=C, 3=G, 4=T. Since human DNA is double-stranded, the person skilled in the art will realise that by assaying or reading the opposite DNA strand, the complementary allele can in each case be measured. Thus, for a polymorphic site (polymorphic marker) characterized by an A/G polymorphism, the methodology employed to detect the marker may be designed to specifically detect the presence of one or both of the two bases possible, i.e. A and G. Alternatively, by designing an assay that is designed to detect the complimentary strand on the DNA template, the presence of the complementary bases T and C can be measured. Quantitatively (for example, in terms of risk estimates), identical results would be obtained from measurement of either DNA strand (+strand or −strand).

[0088] Typically, a reference sequence is referred to for a particular sequence. Alleles that differ from the reference are sometimes referred to as “variant” alleles. A variant sequence, as used herein, refers to a sequence that differs from the reference sequence but is otherwise substantially similar. Alleles at the polymorphic genetic markers described herein are variants. Variants can include changes that affect a polypeptide. Sequence differences, when compared to a reference nucleotide sequence, can include the insertion or deletion of a single nucleotide, or of more than one nucleotide, resulting in a frame shift; the change of at least one nucleotide, resulting in a change in the encoded amino acid; the change of at least one nucleotide, resulting in the generation of a premature stop codon; the deletion of several nucleotides, resulting in a deletion of one or more amino acids encoded by the nucleotides; the insertion of one or several nucleotides, such as by unequal recombination or gene conversion, resulting in an interruption of the coding sequence of a reading frame; duplication of all or a part of a sequence; transposition; or a rearrangement of a nucleotide sequence.

[0089] Such sequence changes can alter the polypeptide encoded by the nucleic acid. For example, if the change in the nucleic acid sequence causes a frame shift, the frame shift can result in a change in the encoded amino acids, and/or can result in the generation of a premature stop codon, causing generation of a truncated polypeptide. Alternatively, a polymorphism can be a synonymous change in one or more nucleotides (i.e., a change that does not result in a change in the amino acid sequence). Such a polymorphism can, for example, alter splice sites, affect the stability or transport of mRNA, or otherwise affect the transcription or translation of an encoded polypeptide. It can also alter DNA to increase the possibility that structural changes, such as amplifications or deletions, occur at the somatic level. The polypeptide encoded by the reference nucleotide sequence is the “reference” polypeptide with a particular reference amino acid sequence, and polypeptides encoded by variant alleles are referred to as “variant” polypeptides with variant amino acid sequences.

[0090] A haplotype refers to a single-stranded segment of DNA that is characterized by a specific combination of alleles arranged along the segment. For diploid organisms such as humans, a haplotype comprises one member of the pair of alleles for each polymorphic marker or locus. In a certain embodiment, the haplotype can comprise two or more alleles, three or more alleles, four or more alleles, or five or more alleles, each allele corresponding to a specific polymorphic marker along the segment. Haplotypes can comprise a combination of various polymorphic markers, e.g., SNPs and microsatellites, having particular alleles at the polymorphic sites. The haplotypes thus comprise a combination of alleles at various genetic markers.

[0091] Detecting specific polymorphic markers and/or haplotypes can be accomplished by methods known in the art for detecting sequences at polymorphic sites. For example, standard techniques for genotyping for the presence of SNPs and/or microsatellite markers can be used, such as fluorescence-based techniques (e.g., Chen, X. et al., Genome Res. 9(5): 492-98 (1999); Kutyavin et al., Nucleic Acid Res. 34:e128 (2006)), utilizing PCR, LCR, Nested PCR and other techniques for nucleic acid amplification. Specific commercial methodologies available for SNP genotyping include, but are not limited to, TaqMan genotyping assays and SNPlex platforms (Applied Biosystems), gel electrophoresis (Applied Biosystems), mass spectrometry (e.g., MassARRAY system from Sequenom), minisequencing methods, real-time PCR, Bio-Plex system (BioRad), CEQ and SNPstream systems (Beckman), array hybridization technology (e.g., Affymetrix GeneChip; Perlegen), BeadArray Technologies (e.g., Illumina GoldenGate and Infinium assays), array tag technology (e.g., Parallele), and endonuclease-based fluorescence hybridization technology (Invader; Third Wave). Some of the available array platforms, including Affymetrix SNP Array 6.0 and Illumina CNV370-Duo and 1M BeadChips, include SNPs that tag certain CNVs. This allows detection of CNVs via surrogate SNPs included in these platforms. Thus, by use of these or other methods available to the person skilled in the art, one or more alleles at polymorphic markers, including microsatellites, SNPs or other types of polymorphic markers, can be identified.

[0092] In certain embodiments, polymorphic markers are detected by sequencing technologies. Obtaining sequence information about an individual identifies particular nucleotides in the context of a sequence. For SNPs, sequence information about a single unique sequence site is sufficient to identify alleles at that particular SNP. For markers comprising more than one nucleotide, sequence information about the nucleotides of the individual that contain the polymorphic site identifies the alleles of the individual for the particular site. The sequence information can be obtained from a sample from the individual. In certain embodiments, the sample is a nucleic acid sample. In certain other embodiments, the sample is a protein sample.

[0093] Various methods for obtaining nucleic acid sequence are known to the skilled person, and all such methods are useful for practicing the invention. Sanger sequencing is a well-known method for generating nucleic acid sequence information. Recent methods for obtaining large amounts of sequence data have been developed, and such methods are also contemplated to be useful for obtaining sequence information. These include pyrosequencing technology (Ronaghi, M. et al. Anal Biochem 267:65-71 (1999); Ronaghi, et al. Biotechniques 25:876-878 (1998)), e.g. 454 pyrosequencing (Nyren, P., et al. Anal Biochem 208:171-175 (1993)), Illumina/Solexa sequencing technology (http://www.illumina.com; see also Strausberg, R L, et al Drug Disc Today 13:569-577 (2008)), and Supported Oligonucleotide Ligation and Detection Platform (SOLID) technology (Applied Biosystems, http://www.appliedbiosystems.com); Strausberg, R L, et al Drug Disc Today 13:569-577 (2008).

[0094] It is possible to impute or predict genotypes for un-genotyped relatives of genotyped individuals. For every un-genotyped case, it is possible to calculate the probability of the genotypes of its relatives given its four possible phased genotypes. In practice it may be preferable to include only the genotypes of the case's parents, children, siblings, half-siblings (and the half-sibling's parents), grand-parents, grand-children (and the grand-children's parents) and spouses. It will be assumed that the individuals in the small sub-pedigrees created around each case are not related through any path not included in the pedigree. It is also assumed that alleles that are not transmitted to the case have the same frequency—the population allele frequency. Let us consider a SNP marker with the alleles A and G. The probability of the genotypes of the case's relatives can then be computed by:

$$Pr ( genotypes of relatives ; θ ) = {\sum }_{h ∈ \{ AA , AG , GA , GG \}} Pr ( h ; θ ) Pr ( genotypes of relatives \vert h ) ,$$

where θ denotes the A allele's frequency in the cases. Assuming the genotypes of each set of relatives are independent, this allows us to write down a likelihood function for θ:

$$L ( θ ) = {\prod }_{i} Pr ( genotypes of relatives of case i ; θ ) . \qquad (* )$$

[0095] This assumption of independence is usually not correct. Accounting for the dependence between individuals is a difficult and potentially prohibitively expensive computational task. The likelihood function in (*) may be thought of as a pseudolikelihood approximation of the full likelihood function for θ which properly accounts for all dependencies. In general, the genotyped cases and controls in a case-control association study are not independent and applying the case-control method to related cases and controls is an analogous approximation. The method of genomic control (Devlin, B. et al., Nat Genet. 36, 1129-30; author reply 1131 (2004)) has proven to be successful at adjusting case-control test statistics for relatedness. We therefore apply the method of genomic control to account for the dependence between the terms in our pseudolikelihood and produce a valid test statistic.

[0096] Fisher's information can be used to estimate the effective sample size of the part of the pseudolikelihood due to un-genotyped cases. Breaking the total Fisher information, I, into the part due to genotyped cases, I_{g}, and the part due to ungenotyped cases, Iᵤ, I=I_{g}+Iᵤ, and denoting the number of genotyped cases with N, the effective sample size due to the un-genotyped cases is estimated by

$$\frac{{I}_{u}}{{I}_{g}} N .$$

[0097] In the present context, an individual who is at an increased susceptibility (i.e., increased risk) for a disease, is an individual in whom at least one specific allele at one or more polymorphic marker or haplotype conferring increased susceptibility (increased risk) for the disease is identified (i.e., at-risk marker alleles or haplotypes). The at-risk marker or haplotype is one that confers an increased risk (increased susceptibility) of the disease. In one embodiment, significance associated with a marker or haplotype is measured by a relative risk (RR). In another embodiment, significance associated with a marker or haplotye is measured by an odds ratio (OR). In a further embodiment, the significance is measured by a percentage. In one embodiment, a significant increased risk is measured as a risk (relative risk and/or odds ratio) of at least 1.2, including but not limited to: at least 1.2, at least 1.3, at least 1.4, at least 1.5, at least 1.6, at least 1.7, 1.8, at least 1.9, at least 2.0, at least 2.5, at least 3.0, at least 4.0, and at least 5.0. In a particular embodiment, a risk (relative risk and/or odds ratio) of at least 1.2 is significant. In another particular embodiment, a risk of at least 1.3 is significant. In yet another embodiment, a risk of at least 1.4 is significant. In a further embodiment, a risk of at least 1.5 is significant. In another further embodiment, a risk of at least 1.7 is significant. However, other cutoffs are also contemplated, e.g., at least 1.15, 1.25, 1.35, and so on, and such cutoffs are also within scope of the present invention. In other embodiments, a significant increase in risk is at least about 20%, including but not limited to about 25%, 30%, 35%, 40%, 45%, 50%, 55%, 60%, 65%, 70%, 75%, 80%, 85%, 90%, 95%, 100%, 150%, 200%, 300%, and 500%. In one particular embodiment, a significant increase in risk is at least 20%. In other embodiments, a significant increase in risk is at least 30%, at least 40%, at least 50%, at least 60%, at least 70%, at least 80%, at least 90% and at least 100%. Other cutoffs or ranges as deemed suitable by the person skilled in the art to characterize the invention are however also contemplated, and those are also within scope of the present invention. In certain embodiments, a significant increase in risk is characterized by a p-value, such as a p-value of less than 0.05, less than 0.01, less than 0.001, less than 0.0001, less than 0.00001, less than 0.000001, less than 0.0000001, less than 0.00000001, or less than 0.000000001.

[0098] An at-risk polymorphic marker or haplotype as described herein is one where at least one allele of at least one marker or haplotype is more frequently present in an individual at risk for the disease (or trait) (affected), or diagnosed with the disease, compared to the frequency of its presence in a comparison group (control), such that the presence of the marker or haplotype is indicative of susceptibility to the disease. The control group may in one embodiment be a population sample, i.e. a random sample from the general population. In another embodiment, the control group is represented by a group of individuals who are disease-free. Such disease-free controls may in one embodiment be characterized by the absence of one or more specific disease-associated symptoms. Alternatively, the disesae-free controls are those that have not been diagnosed with the disease. In another embodiment, the disease-free control group is characterized by the absence of one or more disease-specific risk factors. Such risk factors are in one embodiment at least one environmental risk factor. Representative environmental factors are natural products, minerals or other chemicals which are known to affect, or contemplated to affect, the risk of developing the specific disease or trait. Other environmental risk factors are risk factors related to lifestyle, including but not limited to food and drink habits, geographical location of main habitat, and occupational risk factors. In another embodiment, the risk factors comprise at least one additional genetic risk factor.

[0099] As an example of a simple test for correlation would be a Fisher-exact test on a two by two table. Given a cohort of chromosomes, the two by two table is constructed out of the number of chromosomes that include both of the markers or haplotypes, one of the markers or haplotypes but not the other and neither of the markers or haplotypes. Other statistical tests of association known to the skilled person are also contemplated and are also within scope of the invention.

[0100] The person skilled in the art will appreciate that for markers with two alleles present in the population being studied (such as SNPs), and wherein one allele is found in increased frequency in a group of individuals with a trait or disease in the population, compared with controls, the other allele of the marker will be found in decreased frequency in the group of individuals with the trait or disease, compared with controls. In such a case, one allele of the marker (the one found in increased frequency in individuals with the trait or disease) will be the at-risk allele, while the other allele will be a protective allele.

[0101] Thus, in other embodiments of the invention, an individual who is at a decreased susceptibility (i.e., at a decreased risk) for a disease or trait is an individual in whom at least one specific allele at one or more polymorphic marker or haplotype conferring decreased susceptibility for the disease or trait is identified. The marker alleles and/or haplotypes conferring decreased risk are also said to be protective. In one aspect, the protective marker or haplotype is one that confers a significant decreased risk (or susceptibility) of the disease or trait. In one embodiment, significant decreased risk is measured as a relative risk (or odds ratio) of less than 0.9, including but not limited to less than 0.9, less than 0.8, less than 0.7, less than 0.6, less than 0.5, less than 0.4, less than 0.3, less than 0.2 and less than 0.1. In one particular embodiment, significant decreased risk is less than 0.7. In another embodiment, significant decreased risk is less than 0.5. In yet another embodiment, significant decreased risk is less than 0.3. In another embodiment, the decrease in risk (or susceptibility) is at least 20%, including but not limited to at least 25%, at least 30%, at least 35%, at least 40%, at least 45%, at least 50%, at least 55%, at least 60%, at least 65%, at least 70%, at least 75%, at least 80%, at least 85%, at least 90%, at least 95% and at least 98%. In one particular embodiment, a significant decrease in risk is at least about 30%. In another embodiment, a significant decrease in risk is at least about 50%. In another embodiment, the decrease in risk is at least about 70%. Other cutoffs or ranges as deemed suitable by the person skilled in the art to characterize the invention are however also contemplated, and those are also within scope of the present invention.

[0102] A genetic variant associated with a disease or a trait can be used alone to predict the risk of the disease for a given genotype. For a biallelic marker, such as a SNP, there are 3 possible genotypes: homozygote for the at risk variant, heterozygote, and non carrier of the at risk variant. Risk associated with variants at multiple loci can be used to estimate overall risk. For multiple SNP variants, there are k possible genotypes k=3′×2P; where n is the number autosomal loci and p the number of gonosomal (sex chromosomal) loci. Overall risk assessment calculations for a plurality of risk variants usually assume that the relative risks of different genetic variants multiply, i.e. the overall risk (e.g., RR or OR) associated with a particular genotype combination is the product of the risk values for the genotype at each locus. If the risk presented is the relative risk for a person, or a specific genotype for a person, compared to a reference population with matched gender and ethnicity, then the combined risk is the product of the locus specific risk values and also corresponds to an overall risk estimate compared with the population. If the risk for a person is based on a comparison to non-carriers of the at risk allele, then the combined risk corresponds to an estimate that compares the person with a given combination of genotypes at all loci to a group of individuals who do not carry risk variants at any of those loci. The group of non-carriers of any at risk variant has the lowest estimated risk and has a combined risk, compared with itself (i.e., non-carriers) of 1.0, but has an overall risk, compare with the population, of less than 1.0. It should be noted that the group of non-carriers can potentially be very small, especially for large number of loci, and in that case, its relevance is correspondingly small.

[0103] The multiplicative model is a parsimonious model that usually fits the data of complex traits reasonably well. Deviations from multiplicity have been rarely described in the context of common variants for common diseases, and if reported are usually only suggestive since very large sample sizes are usually required to be able to demonstrate statistical interactions between loci.

[0104] By way of an example, let us consider seven variants disclosed herein to be associated with ECG measures and related diseases (rs6795970, rs7660702, rs132311, rs3807989, rs1733724, rs3825214 and rs365990). The total number of theoretical genotypic combinations for these seven SNP variants 3⁷=2187. Some of those genotypic combinations are very rare, but are still possible; therefore, all of these combinations should be considered for overall risk assessment.

[0105] It is likely that the multiplicative model applied in the case of multiple genetic variant will also be valid in conjugation with non-genetic risk variants assuming that the genetic variant does not clearly correlate with the “environmental” factor. In other words, genetic and non-genetic at-risk variants can be assessed under the multiplicative model to estimate combined risk, assuming that the non-genetic and genetic risk factors do not interact.

### Linkage Disequilibrium

[0106] The natural phenomenon of recombination, which occurs on average once for each chromosomal pair during each meiotic event, represents one way in which nature provides variations in sequence (and biological function by consequence). It has been discovered that recombination does not occur randomly in the genome; rather, there are large variations in the frequency of recombination rates, resulting in small regions of high recombination frequency (also called recombination hotspots) and larger regions of low recombination frequency, which are commonly referred to as Linkage Disequilibrium (LD) blocks (Myers, S. et al., Biochem Soc Trans 34:526-530 (2006); Jeffreys, A. J., et al., Nature Genet. 29:217-222 (2001); May, C. A., et al., Nature Genet. 31:272-275 (2002)).

[0107] Linkage Disequilibrium (LD) refers to a non-random assortment of two genetic elements. For example, if a particular genetic element (e.g., an allele of a polymorphic marker, or a haplotype) occurs in a population at a frequency of 0.50 (50%) and another element occurs at a frequency of 0.50 (50%), then the predicted occurrence of a person's having both elements is 0.25 (25%), assuming a random distribution of the elements. However, if it is discovered that the two elements occur together at a frequency higher than 0.25, then the elements are said to be in linkage disequilibrium, since they tend to be inherited together at a higher rate than what their independent frequencies of occurrence (e.g., allele or haplotype frequencies) would predict. Roughly speaking, LD is generally correlated with the frequency of recombination events between the two elements. Allele or haplotype frequencies can be determined in a population by genotyping individuals in a population and determining the frequency of the occurrence of each allele or haplotype in the population. For populations of diploids, e.g., human populations, individuals will typically have two alleles or allelic combinations for each genetic element (e.g., a marker, haplotype or gene).

[0108] Many different measures have been proposed for assessing the strength of linkage disequilibrium (LD; reviewed in Devlin, B. & Risch, N., Genomics 29:311-22 (1995)). Most capture the strength of association between pairs of biallelic sites. Two important pairwise measures of LD are r² (sometimes denoted Δ²) and |D′| (Lewontin, R., Genetics 49:49-67 (1964); Hill, W. G. & Robertson, A. Theor. Appl. Genet. 22:226-231 (1968)). Both measures range from 0 (no disequilibrium) to 1 (‘complete’ disequilibrium), but their interpretation is slightly different. |D′| is defined in such a way that it is equal to 1 if just two or three of the possible haplotypes for two markers are present, and it is <1 if all four possible haplotypes are present. Therefore, a value of |D′| that is <1 indicates that historical recombination may have occurred between two sites (recurrent mutation can also cause |D′| to be <1, but for single nucleotide polymorphisms (SNPs) this is usually regarded as being less likely than recombination). The measure r² represents the statistical correlation between two sites, and takes the value of 1 if only two haplotypes are present.

[0109] The r² measure is arguably the most relevant measure for association mapping, because there is a simple inverse relationship between r² and the sample size required to detect association between susceptibility loci and SNPs. These measures are defined for pairs of sites, but for some applications a determination of how strong LD is across an entire region that contains many polymorphic sites might be desirable (e.g., testing whether the strength of LD differs significantly among loci or across populations, or whether there is more or less LD in a region than predicted under a particular model). Roughly speaking, r measures how much recombination would be required under a particular population model to generate the LD that is seen in the data. This type of method can potentially also provide a statistically rigorous approach to the problem of determining whether LD data provide evidence for the presence of recombination hotspots. For the methods described herein, a significant r² value between markers indicative of the markers being in linkage disequilibrium can be at least 0.1, such as at least 0.15, 0.20, 0.25, 0.30, 0.35, 0.40, 0.45, 0.50, 0.55, 0.60, 0.65, 0.70, 0.75, 0.80, 0.85, 0.90, 0.91, 0.92, 0.93, 0.94, 0.95, 0.96, 0.97, 0.98, or at least 0.99. In one preferred embodiment, the significant r² value can be at least 0.2. Alternatively, markers in linkage disequilibrium are characterized by values of |D′| of at least 0.2, such as 0.3, 0.4, 0.5, 0.6, 0.7, 0.8, 0.85, 0.9, 0.95, 0.96, 0.97, 0.98, or at least 0.99. Thus, linkage disequilibrium represents a correlation between alleles of distinct markers. In certain embodiments, linkage disequilibrium is defined in terms of values for both the r² and |D′| measures. In one such embodiment, a significant linkage disequilibrium is defined as r²>0.1 and/or |D′|>0.8, and markers fulfilling these criteria are said to be in linkage disequilibrium. In another embodiment, a significant linkage disequilibrium is defined as r²>0.2 and/or |D′|>0.9. Other combinations and permutations of values of r² and |D′| for determining linkage disequilibrium are also contemplated, and are also within the scope of the invention. Linkage disequilibrium can be determined in a single human population, as defined herein, or it can be determined in a collection of samples comprising individuals from more than one human population. In one embodiment of the invention, LD is determined in a sample from one or more of the HapMap populations (Caucasian, African (Yuroban), Japanese, Chinese), as defined (http://www.hapmap.org). In one such embodiment, LD is determined in the CEU population of the HapMap samples (Utah residents with ancestry from northern and western Europe). In another embodiment, LD is determined in the YR1 population of the HapMap samples (Yuroba in Ibadan, Nigeria). In another embodiment, LD is determined in the CHB population of the HapMap samples (Han Chinese from Beijing, China). In another embodiment, LD is determined in the JPT population of the HapMap samples (Japanese from Tokyo, Japan). In yet another embodiment, LD is determined in samples from the Icelandic population.

[0110] If all polymorphisms in the genome were independent at the population level (i.e., no LD), then every single one of them would need to be investigated in association studies, to assess all the different polymorphic states. However, due to linkage disequilibrium between polymorphisms, tightly linked polymorphisms are strongly correlated, which reduces the number of polymorphisms that need to be investigated in an association study to observe a significant association. Another consequence of LD is that many polymorphisms may give an association signal due to the fact that these polymorphisms are strongly correlated.

[0111] Genomic LD maps have been generated across the genome, and such LD maps have been proposed to serve as framework for mapping disease-genes (Risch, N. & Merkiangas, K, Science 273:1516-1517 (1996); Maniatis, N., et al., Proc Natl Aced Sci USA 99:2228-2233 (2002); Reich, D E et al, Nature 411:199-204 (2001)).

[0112] It is now established that many portions of the human genome can be broken into series of discrete haplotype blocks containing a few common haplotypes; for these blocks, linkage disequilibrium data provides little evidence indicating recombination (see, e.g., Wall., J. D. and Pritchard, J. K., Nature Reviews Genetics 4:587-597 (2003); Daly, M. et al., Nature Genet. 29:229-232 (2001); Gabriel, S. B. et al., Science 296:2225-2229 (2002); Patil, N. et al., Science 294:1719-1723 (2001); Dawson, E. et al., Nature 418:544-548 (2002); Phillips, M. S. et al., Nature Genet. 33:382-387 (2003)).

[0113] There are two main methods for defining these haplotype blocks: blocks can be defined as regions of DNA that have limited haplotype diversity (see, e.g., Daly, M. et al., Nature Genet. 29:229-232 (2001); Patil, N. et al., Science 294:1719-1723 (2001); Dawson, E. et al., Nature 418:544-548 (2002); Zhang, K. et al., Proc. Natl. Acad. Sci. USA 99:7335-7339 (2002)), or as regions between transition zones having extensive historical recombination, identified using linkage disequilibrium (see, e.g., Gabriel, S. B. et al., Science 296:2225-2229 (2002); Phillips, M. S. et al., Nature Genet. 33:382-387 (2003); Wang, N. et al., Am. J. Hum. Genet. 71:1227-1234 (2002); Stumpf, M. P., and Goldstein, D. B., Curr. Biol. 13:1-8 (2003)). More recently, a fine-scale map of recombination rates and corresponding hotspots across the human genome has been generated (Myers, S., et al., Science 310:321-32324 (2005); Myers, S. et al., Biochem Soc Trans 34:526530 (2006)). The map reveals the enormous variation in recombination across the genome, with recombination rates as high as 10-60 cM/Mb in hotspots, while closer to 0 in intervening regions, which thus represent regions of limited haplotype diversity and high LD. The map can therefore be used to define haplotype blocks/LD blocks as regions flanked by recombination hotspots. As used herein, the terms “haplotype block” or “LD block” includes blocks defined by any of the above described characteristics, or other alternative methods used by the person skilled in the art to define such regions.

[0114] Haplotype blocks (LD blocks) can be used to map associations between phenotype and haplotype status, using single markers or haplotypes comprising a plurality of markers. The main haplotypes can be identified in each haplotype block, and then a set of “tagging” SNPs or markers (the smallest set of SNPs or markers needed to distinguish among the haplotypes) can then be identified. These tagging SNPs or markers can then be used in assessment of samples from groups of individuals, in order to identify association between phenotype and haplotype. Markers shown herein to be associated with ECG measures and associated diseases (Atrial Fibrillation, Atrial Flutter and Stroke) are such tagging markers. If desired, neighboring haplotype blocks can be assessed concurrently, as there may also exist linkage disequilibrium among the haplotype blocks.

[0115] It has thus become apparent that for any given observed association to a polymorphic marker in the genome, additional markers in the genome also show association. This is a natural consequence of the uneven distribution of LD across the genome, as observed by the large variation in recombination rates. The markers used to detect association thus in a sense represent “tags” for a genomic region (i.e., a haplotype block or LD block) that is associating with a given disease or trait, and as such are useful for use in the methods and kits of the present invention. One or more causative (functional) variants or mutations may reside within the region found to be associating to the disease or trait. The functional variant may be another SNP, a tandem repeat polymorphism (such as a minisatellite or a microsatellite), a transposable element, or a copy number variation, such as an inversion, deletion or insertion. Such variants in LD with the variants described herein may confer a higher relative risk (RR) or odds ratio (OR) than observed for the tagging markers used to detect the association. The present invention thus refers to the markers used for detecting association to the disease, as described herein, as well as markers in linkage disequilibrium with the markers. Thus, in certain embodiments of the invention, markers that are in LD with the markers originally used to detect an association may be used as surrogate markers. The surrogate markers have in one embodiment relative risk (RR) and/or odds ratio (OR) values smaller than originally detected. In other embodiments, the surrogate markers have RR or OR values greater than those initially determined for the markers initially found to be associating with the disease. An example of such an embodiment would be a rare, or relatively rare (such as <10% allelic population frequency) variant in LD with a more common variant (>10% population frequency) initially found to be associating with the disease. Identifying and using such surrogate markers for detecting the association can be performed by routine methods well known to the person skilled in the art, and are therefore within the scope of the present invention.

### Determination of Haplotype Frequency

[0116] The frequencies of haplotypes in patient and control groups can be estimated using an expectation-maximization algorithm (Dempster A. et al., J. R. Stat. Soc. B, 39:1-38 (1977)). An implementation of this algorithm that can handle missing genotypes and uncertainty with the phase can be used. Under the null hypothesis, the patients and the controls are assumed to have identical frequencies. Using a likelihood approach, an alternative hypothesis is tested, where a candidate at-risk-haplotype, which can include the markers described herein, is allowed to have a higher frequency in patients than controls, while the ratios of the frequencies of other haplotypes are assumed to be the same in both groups. Likelihoods are maximized separately under both hypotheses and a corresponding 1-df likelihood ratio statistic is used to evaluate the statistical significance.

[0117] To look for at-risk and protective markers and haplotypes within a susceptibility region, for example within an LD block, association of all possible combinations of genotyped markers within the region is studied. The combined patient and control groups can be randomly divided into two sets, equal in size to the original group of patients and controls. The marker and haplotype analysis is then repeated and the most significant p-value registered is determined. This randomization scheme can be repeated, for example, over 100 times to construct an empirical distribution of p-values. In a preferred embodiment, a p-value of <0.05 is indicative of a significant marker and/or haplotype association.

### Haplotype Analysis

[0118] One general approach to haplotype analysis involves using likelihood-based inference applied to NEsted MOdels (Gretarsdottir S., et al., Nat. Genet. 35:131-38 (2003)). The method is implemented in the program NEMO, which allows for many polymorphic markers, SNPs and microsatellites. The method and software are specifically designed for case-control studies where the purpose is to identify haplotype groups that confer different risks. It is also a tool for studying LD structures. In NEMO, maximum likelihood estimates, likelihood ratios and p-values are calculated directly, with the aid of the EM algorithm, for the observed data treating it as a missing-data problem.

[0119] Even though likelihood ratio tests based on likelihoods computed directly for the observed data, which have captured the information loss due to uncertainty in phase and missing genotypes, can be relied on to give valid p-values, it would still be of interest to know how much information had been lost due to the information being incomplete. The information measure for haplotype analysis is described in Nicolae and Kong (Technical Report 537, Department of Statistics, University of Statistics, University of Chicago; Biometrics, 60(2):368-75 (2004)) as a natural extension of information measures defined for linkage analysis, and is implemented in NEMO.

### Association Analysis

[0120] For single marker association to a disease, the Fisher exact test can be used to calculate two-sided p-values for each individual allele. Correcting for relatedness among patients can be done by extending a variance adjustment procedure previously described (Risch, N. & Teng, J. Genome Res., 8:1273-1288 (1998)) for sibships so that it can be applied to general familial relationships. The method of genomic controls (Devlin, B. & Roeder, K. Biometrics 55:997 (1999)) can also be used to adjust for the relatedness of the individuals and possible stratification.

[0121] For both single-marker and haplotype analyses, relative risk (RR) and the population attributable risk (PAR) can be calculated assuming a multiplicative model (haplotype relative risk model) (Terwilliger, J. D. & Ott, J., Hum. Hered. 42:337-46 (1992) and Falk, C. T. & Rubinstein, P, Ann. Hum. Genet. 51 (Pt 3):227-33 (1987)), i.e., that the risks of the two alleles/haplotypes a person carries multiply. For example, if RR is the risk of A relative to a, then the risk of a person homozygote AA will be RR times that of a heterozygote Aa and RR² times that of a homozygote aa. The multiplicative model has a nice property that simplifies analysis and computations—haplotypes are independent, i.e., in Hardy-Weinberg equilibrium, within the affected population as well as within the control population. As a consequence, haplotype counts of the affecteds and controls each have multinomial distributions, but with different haplotype frequencies under the alternative hypothesis. Specifically, for two haplotypes, hᵢ and hⱼ, risk(hᵢ)/risk(hⱼ)=(fᵢ/pᵢ)/(fⱼ/pⱼ), where f and p denote, respectively, frequencies in the affected population and in the control population. While there is some power loss if the true model is not multiplicative, the loss tends to be mild except for extreme cases. Most importantly, p-values are always valid since they are computed with respect to null hypothesis.

[0122] An association signal detected in one association study may be replicated in a second cohort, ideally from a different population (e.g., different region of same country, or a different country) of the same or different ethnicity. The advantage of replication studies is that the number of tests performed in the replication study is usually quite small, and hence the less stringent the statistical measure that needs to be applied. For example, for a genome-wide search for susceptibility variants for a particular disease or trait using 300,000 SNPs, a correction for the 300,000 tests performed (one for each SNP) can be performed. Since many SNPs on the arrays typically used are correlated (i.e., in LD), they are not independent. Thus, the correction is conservative. Nevertheless, applying this correction factor requires an observed P-value of less than 0.05/300,000 =1.7×10⁻⁷ for the signal to be considered significant applying this conservative test on results from a single study cohort. Obviously, signals found in a genome-wide association study with P-values less than this conservative threshold (i.e., more significant) are a measure of a true genetic effect, and replication in additional cohorts is not necessarily from a statistical point of view. Importantly, however, signals with P-values that are greater than this threshold may also be due to a true genetic effect. The sample size in the first study may not have been sufficiently large to provide an observed P-value that meets the conservative threshold for genome-wide significance, or the first study may not have reached genome-wide significance due to inherent fluctuations due to sampling. Since the correction factor depends on the number of statistical tests performed, if one signal (one SNP) from an initial study is replicated in a second case-control cohort, the appropriate statistical test for significance is that for a single statistical test, i.e., P-value less than 0.05. Replication studies in one or even several additional case-control cohorts have the added advantage of providing assessment of the association signal in additional populations, thus simultaneously confirming the initial finding and providing an assessment of the overall significance of the genetic variant(s) being tested in human populations in general.

[0123] The results from several case-control cohorts can also be combined to provide an overall assessment of the underlying effect. The methodology commonly used to combine results from multiple genetic association studies is the Mantel-Haenszel model (Mantel and Haenszel, J Natl Cancer Inst 22:719-48 (1959)). The model is designed to deal with the situation where association results from different populations, with each possibly having a different population frequency of the genetic variant, are combined. The model combines the results assuming that the effect of the variant on the risk of the disease, a measured by the OR or RR, is the same in all populations, while the frequency of the variant may differ between the populations. Combining the results from several populations has the added advantage that the overall power to detect a real underlying association signal is increased, due to the increased statistical power provided by the combined cohorts. Furthermore, any deficiencies in individual studies, for example due to unequal matching of cases and controls or population stratification will tend to balance out when results from multiple cohorts are combined, again providing a better estimate of the true underlying genetic effect.

### Methods of Determining Susceptibility to Electrocardiogram Measures, Atrial Fibrillation, Atrial Flutter and Stroke

[0124] The present inventors have for the first time shown that certain polymorphic variants are associated with electrocardiogram measures. Certain alleles at these variants correlate with increased electrocardiogram measures, including the PR, QRS and QT intervals, and heart rate. These variants have also been found to be associated with risk of sick sinus syndrome, atrioventricular block, pacemaker placement, as well as risk of developing Atrial Fibrillation, Atrial Flutter and/or Stroke. These polymorphic markers, as well as markers in linkage disequilibrium with these polymorphic markers, are contemplated to be useful as markers for determining susceptibility to any one or more, or any combination of, of these conditions. These markers are believed to be useful in a range of diagnostic applications, as described further herein.

[0125] Accordingly, in one aspect the invention provides a method of determining a susceptibility to a vascular condition selected from the group consisting of: an abnormal electrocardiogram measure, Atrial Fibrillation, Atrial Flutter, and Stroke, in a human individual, the method comprising: (i) obtaining sequence data about a human individual identifying at least one allele of at least one polymorphic marker, wherein different alleles of the at least one polymorphic marker are associated with different susceptibilities to the condition in humans, and (ii) determining a susceptibility to the condition from the sequence data, wherein the at least one polymorphic marker is selected from the group consisting of rs3825214, rs6795970, rs3807989, rs7660702, rs132311, rs1733724 and rs365990, and markers in linkage disequilibrium therewith.

[0126] Another aspect relates to a method of determining a susceptibility to a vascular condition selected from the group consisting of: an abnormal electrocardiogram measure, Atrial Fibrillation, Atrial Flutter, and Stroke, in a human individual, the method comprising analyzing sequence data about a human individual identifying at least one allele of at least one polymorphic marker, wherein different alleles of the at least one polymorphic marker are associated with different susceptibilities to the condition in humans, and determining a susceptibility to the condition from the sequence data, wherein the at least one polymorphic marker is selected from the group consisting of rs3825214, rs6795970, rs3807989, rs7660702, rs132311, rs1733724 and rs365990, and markers in linkage disequilibrium therewith.

[0127] Abnormal electrocardiogram measures, in the present context, are electrocardiogram measures that deviate from what is considered normal. The abnormal measure may be elevated, or increased, or the abnormal measure may be deflated or decreased.

[0128] In certain embodiments, the abnormal electrocardiogram measure is selected from the group consisting of an increased QRS interval, an increased PR interval, an increased QT interval, sick sinus syndrome and an increased heart rate. In certain embodiments, the abnormal electrocardiogram measure is selected from the group consisting of a decreased QRS interval, a decreased PR interval, a decreased QT interval, sick sinus syndrome and a decreased heart rate. In certain embodiments, the abnormal electrocardiogram measure is selected from the group consisting of an increased and/or decreased QRS interval, an increased and/or decreased PR interval, an increased and/or decreased QT interval, and an increased and/or decreased heart rate. Thus, certain alleles at polymorphic markers described herein are predictive of increased ECG measures, while other alleles at these markers are predictive of decreased ECG measures. Thus, the markers may be useful for detecting susceptibility to increased ECG measures, detecting a susceptibility to decreased ECG measures, or useful for detecting susceptibility to both increase and decreased ECG susceptibility.

[0129] In one preferred embodiment, the vascular condition is Atrial Fibrillation and the marker is selected from the group consisting of rs3825214 and rs3807989, and markers in linkage disequilibrium therewith. In another preferred embodiment, the vascular condition is Atrial Fibrillation and the marker is selected from the group consisting of the markers set forth in Table 15 and Table 17. In another preferred embodiment, the vascular condition is Atrial Fibrillation and the marker is selected from the group consisting of the markers set forth in Table 15. In another preferred embodiment, the vascular condition is Atrial Fibrillation and the marker is selected from the group consisting of the markers set forth in Table 17.

[0130] In another preferred embodiment, the vascular condition is Pacemaker placement and the marker is selected from the group consisting of rs6795970, and markers in linkage disequilibrium therewith. In another preferred embodiment, the vascular condition is Pacemaker placement and the marker is selected from the group consisting of the markers set forth in Table 20.

[0131] In another preferred embodiment, the vascular condition is abnormal heart rate, and the marker is selected from the group consisting of rs365990, and markers in linkage disequilibrium therewith. In another preferred embodiment, the vascular condition is abnormal heart rate, and the marker is selected from the group consisting of the markers set forth in Table 21. In certain embodiments, the abnormal heart rate is elevated heart rate.

[0132] In another embodiment, the electrocardiogram measure is QRS interval, and the at least one polymorphic marker is selected from the group consisting of rs3825214, rs6795970, rs1321311 and rs1733724, and markers in linkage disequilibrium therewith. In another embodiment, the electrocardiogram measure is QRS interval, and the at least one polymorphic marker is selected from the group consisting of the markers set forth in Table 13, Table 19, Table 23 and Table 24. In another embodiment, the electrocardiogram measure is QRS interval, and the at least one polymorphic marker is selected from the group consisting of the markers set forth in Table 13. In another embodiment, the electrocardiogram measure is QRS interval, and the at least one polymorphic marker is selected from the group consisting of the markers set forth in Table 19. In another embodiment, the electrocardiogram measure is QRS interval, and the at least one polymorphic marker is selected from the group consisting of the markers set forth in Table 23. In another embodiment, the electrocardiogram measure is QRS interval, and the at least one polymorphic marker is selected from the group consisting of the markers set forth in Table 24.

[0133] In another embodiment, the electrocardiogram measure is PR interval, and the at least one polymorphic marker is selected from the group consisting of rs3825214, rs3807989, rs6795970 and rs7660702, and markers in linkage disequilibrium therewith. In another embodiment, the electrocardiogram measure is PR interval, and the at least one polymorphic marker is selected from the group consisting of the markers set forth in Table 14, Table 16, Table 18 and Table 22. In another embodiment, the electrocardiogram measure is PR interval, and the at least one polymorphic marker is selected from the group consisting of the markers set forth in Table 14. In another embodiment, the electrocardiogram measure is PR interval, and the at least one polymorphic marker is selected from the group consisting of the markers set forth in Table 16. In another embodiment, the electrocardiogram measure is PR interval, and the at least one polymorphic marker is selected from the group consisting of the markers set forth in Table 18. In another embodiment, the electrocardiogram measure is PR interval, and the at least one polymorphic marker is selected from the group consisting of the markers set forth in Table 22.

[0134] In certain embodiments, the sequence data is nucleic acid sequence data. In certain other embodiments, the sequence data is amino acid sequence data (e.g., protein sequence data or polypeptide sequence data). It may be useful to obtain sequence data about more than more polymorphic marker. Certain embodiments therefore comprise obtaining sequence data (nucleic acid sequence data and/or polypeptide sequence data) about at least two polymorphic markers.

[0135] Nucleic acid sequence data may be obtained using techniques and methods known to the skilled person. For example, in one embodiment, obtaining nucleic acid sequence data comprises obtaining a biological sample from the human individual and analyzing sequence of the at least one polymorphic marker in the sample. Determination of the sequence of a polymorphism comprises a determination of the allele or alleles present at the polymorphic site in the genome of the individual. Alternatively, the sequence of the individual may be analyzed in a dataset that contains information about the sequence of the individual. In certain embodiments, the dataset is a genotype dataset. Analyzing the allele(s) present in the dataset for a polymorphic marker is a determination of the sequence of the polymorphic marker in the individual at the particular polymorphic marker. In certain other embodiments, the dataset is a sequence dataset comprising genomic sequence information about the individual. The sequence information may comprise the entire genomic sequence of the individual; alternatively, the sequence information comprises a portion of the genomic sequence of the individual. Preferably, the sequence information includes information about at least one polymorphic marker in the genome of the individual.

[0136] Sequence data may in certain embodiments be predetermined. In other words, the invention may be practiced by obtaining sequence information from a preexisting record and analyzing the sequence information. The preexisting record is suitably in a computer-readable format, but may also be in other formats, such as printed sequence information.

[0137] In one embodiment, the genotype dataset comprises a table, such as a look-up table, containing information about at least one risk measure of the vascular condition for the at least one polymorphic marker. For example, the look-up table may contain information about the relative risk (RR) and/or odds ratio (OR) for a particular polymorphic marker for the vascular condition.

[0138] Risk assessment for a particular polymorphic marker, or a plurality of markers, may be reported in any convenient manner known to the skilled person. For example, a risk assessment report for an individual may be generated and made available to the individual or a third party. The report may contain a personal identifier and at least one risk measure for at least one marker. The report may contain a risk measure for a combination of markers, as described herein. The report may be made available through a database or server, for example via a web interface. The report may also be provided in a printed format.

[0139] In certain embodiments, the sequence data is amino acid sequence data. In one embodiment, the amino acid sequence data identifies the presence or absence of an amino acid substitution in a protein selected from the group consisting of the human SCN10A protein and the human MYH6 protein. In one preferred embodiment, the amino acid substitution is a Valine to Alanine substitution at position 1073 (V1073A) of a human SCN10A protein. In another preferred embodiment, the amino acid substitution is an Alanine to Valine substitution at position 1101 (A1101V) of a human MYH6 protein.

[0140] As described further herein, surrogate markers in linkage disequilibrium with a marker of interest (e.g., a marker predictive of an ECG measure or a related phenotype, such as Atrial Fibrillation, Pacemaker placment) may also be used to practice the present invention. Surrogate markers are in linkage disequilibrium with the anchor marker by certain numerical values of a measure of linkage disequilibrium, such as D′ or r². In preferred embodiments of the invention, surrogate markers are selected from groups of markers correlated with an anchor marker (i.e., in linkage disequilibrium with the anchor marker) by certain values of r². In certain preferred embodiments, the surrogate markers are in LD with the anchor marker by values of r² of greater than 0.2. The surrogate markers may also be suitably selected based on other values of r², such as values of r² of greater than 0.3, greater than 0.4, greater than 0.5, greater than 0.6, greater than 0.7, greater than 0.8, greater than 0.9, and greater than 0.95. Exemplary surrogate markers are given in Tables 6-12 herein, together with values of the LD measures D′ and r², which can be used to selected surrogate markers using any suitable cutoff value of r² of 0.1 or 0.2 or greater. Further surrogate markers are given in Tables 13-24 herein, together with observed values of their association with electrocardiogram measures, Pacemaker placement and Atrial Fibrillation.

[0141] In certain embodiments, markers in linkage disequilibrium with rs6795970 are selected from the group consisting of rs6599240, rs11129800, rs11129801, rs11710006, rs11924846, rs9990137, rs6805187, rs7617547, rs6771157, rs4076737, rs12632942, rs7430477, rs6795970, rs6801957, rs7433306, rs6780103, rs6790396, rs6800541, rs7615140, rs6599250, rs6599251, rs7430451, rs6599254, rs6599255, rs12630795, rs6798015, rs6763876, rs6599256, rs7641844, rs7432804, rs7430439, rs7651106, rs6599257, rs7610489, rs7650384, rs4414778, and rs10212338, which are the markers listed in Table 6.

[0142] In certain embodiments, markers in linkage disequilibrium with rs7660702 are selected from the group consisting of rs7698203, rs6849659, rs2101134, rs10017047, rs12648692, rs13134382, rs17010599, rs7655100, rs7677064, rs10033273, rs7439720, rs900204, rs11731040, rs931195, rs17010632, rs1871864, rs1871865, rs1482085, rs11735639, rs4413396, rs13146939, rs13152150, rs13128115, rs12509904, rs12650494, rs10012090, rs7691602, rs7692808, rs7658797, rs17010697, rs343860, rs13108523, rs1482094, rs7676486, rs7660702, rs2062098, rs1482091, rs6813860, rs994285, rs343853, rs343849, rs3889735, rs2601855, rs2601857, rs7682971, rs10516755, rs1020584, rs13106553, rs12510813, rs12507272, rs13137008, rs13112493, rs4693735, rs12507198, rs13111662, rs11732231, rs11736641, rs11097071, rs7674888, rs1966862, rs12054628, rs17010839, rs11945319, rs6831420, rs7680588, rs17010851, rs17010857, rs4693736, rs13105921, rs17010887, rs17010892, rs17395020, rs17399123, rs10516756, rs1452681, rs9790823, rs7683733, rs7662174, rs7684607, rs13118915, rs17010925, rs12503243, rs7675429, rs7689056, and rs7693640, which are the markers listed in Table 7.

[0143] In certain embodiments, markers in linkage disequilibrium with rs1321311 are selected from the group consisting of rs6457931, rs12207916, rs1321313, rs4713994, rs1321311, rs1321310, rs4331968, rs9470361, rs6930671, rs11969445, rs9470366, rs6936993, rs9470367, rs7756236, rs9462207, rs9368950, rs9462208, rs9462209, rs9462210, rs10807170, rs4713996, rs9394368, rs4713999, rs4711457, rs6930083, rs4714001, rs1321309, rs733590, rs2395655, rs3176352, rs12207548, rs12191972, rs7767246, rs6937605, rs7762245, which are the markers listed in Table 8.

[0144] In certain embodiments, markers in linkage disequilibrium with rs3807989 are selected from the group consisting of rs2157799, rs721994, rs1728723, rs2049902, rs11772856, rs1858810, rs7781492, rs10464649, rs12706089, rs7782281, rs4727831, rs768108, rs717957, rs1883049, rs6959099, rs6975771, rs6976316, rs6954077, rs728690, rs10228178, rs2402081, rs2270188, rs10271007, rs4730743, rs4727833, rs2109513, rs6466579, rs3919515, rs975028, rs2215448, rs2742125, rs3779512, rs9649394, rs1474510, rs3807986, rs6466584, rs6466585, rs1476833, rs976739, rs3807989, rs3801995, rs3815412, rs11773845, rs9886215, rs9886219, rs2109516, rs3757732, rs3757733, rs7804372, rs729949, rs3807990, rs3807992, rs3807994, rs6466587, rs6466588, rs1049314, rs8713, rs6867, rs1049337, rs6961215, rs6961388, rs10280730, rs10232369, rs6959106, rs7802124, rs7802438, rs1860588, rs2052106, rs11979486, rs10273326, rs6466589, rs7795356, rs2109517, rs2056865, rs2191503, rs4727835, rs7800573, rs6955302, rs6978354, which are the markers listed in Table 9.

[0145] In certain embodiments, markers in linkage disequilibrium with rs1733724 are selected from the group consisting of rs1149782, rs1149781, rs1194673, rs1149776, rs1149775, rs1149772, rs1149769, rs1194671, rs1194670, rs1194669, rs1194668, rs6480837, rs1209265, rs1194664, rs1194663, rs1660760, rs12355839, rs1194743, rs1733724, which are the markers listed in Table 10.

[0146] In certain embodiments, markers in linkage disequilibrium with rs3825214 are selected from the group consisting of rs6489952, rs1895593, rs7966567, rs8181608, rs10744818, rs8181683, rs8181627, rs10744819, rs6489953, rs10744820, rs1895587, rs9669457, rs6489955, rs7309910, rs7308120, rs2384409, rs2891503, rs7977083, rs1895597, rs7316919, rs6489956, rs883079, rs2113433, rs3825214, rs12367410, rs10507248, rs7955405, rs10744823, rs7312625, rs4767237, rs7135659, rs1895585, rs1946295, rs1946293, rs3825215, rs1895582, rs7964303, rs17731569, which are the markers listed in Table 11.

[0147] In certain embodiments, markers in linkage disequilibrium with rs365990 are selected from the group consisting of rs3811178, rs8022522, rs365990, rs445754, rs10149522, rs452036, rs412768, rs439735, rs388914, rs440466, rs2277474, rs7143356, rs12147570, rs2284651, rs7149517, rs2331979, rs3729833, rs765021, rs7140721, rs3729829, rs3729828, rs3729825, rs7159367, rs12894524, rs2277475, rs12147533, rs743567, rs7157716, rs2754163, which are the markers listed in Table 12.

[0148] Obviously, any particular marker is in linkage disequilibrium with itself. Markers in linkage disequilibrium with an anchor marker therefore include the anchor marker itself. Thus, even though a particular list, such as the foregoing list, of surrogate markers does not include the anchor marker itself, it should be understood that suitable surrogates of any particular anchor marker include the anchor marker itself. In one such embodiment, markers in linkage disequilibrium with rs365990 are selected from the group consisting of rs3811178, rs8022522, rs445754, rs10149522, rs452036, rs412768, rs439735, rs388914, rs440466, rs2277474, rs7143356, rs12147570, rs2284651, rs7149517, rs2331979, rs3729833, rs765021, rs7140721, rs3729829, rs3729828, rs3729825, rs7159367, rs12894524, rs2277475, rs12147533, rs743567, rs7157716, rs2754163. Comparable embodiments of surrogate markers based on the foregoing lists of markers are also contemplated and are within scope of the invention.

[0149] Particular alleles at the polymorphic markers disclosed herein are indicative of an increased or decreased susceptibility to a particular trait. For example, the G allele of rs3825214, the A allele of rs6795970, the A allele of rs3807989, and the T allele of rs7660702 are indicative of increased susceptibility to an increased PR interval. Marker alleles of surrogate markers are likewise indicative of increased susceptibility to an increased PR interval. Further, the T allele of rs132311, the T allele of rs1733724 and the G allele of rs365990 are indicative of susceptibility to an increased QRS interval, as are marker alleles in linkage disequilibrium with these alleles. The G allele of marker rs365990 is indicative of increased heart rate in humans, as are its surrogate marker alleles, and the G allele of rs3825214 and its surrogate markers is indicative of increased susceptibility to an increased QT interval. The risk of advanced atrioventricular block (AVB) is increased in individuals with the G allele of rs3825214 or its surrogates. Risk of having a pacemaker placed is increased in individuals with the G allele of rs3825214 or its surrogates. Furthermore, individuals with the G allele of rs3825214 are at increased susceptibility to a condition selected from the group consisting of: increased PR interval, increased QRS interval, increased QT interval, atrioventricular block, and pacemaker placement. Risk of the ECG related disorders Atrial Fibrillation and Atrial Flutter is also affected by the variants described herein. Thus, the presence of at least one allele selected from the group consisting of: the A allele of rs3825214 and the G allele of rs3807989, is indicative of increased susceptibility to Atrial Fibrillation or Atrial Flutter. Surrogate marker alleles of these alleles are also indicative of risk of these diseases.

[0150] Alleles that are correlated with particular risk alleles are themselves predicted risk alleles. Thus, by way of example, the alleles recited in Tables 6-12 herein as being correlated with particular risk variants are predicted risk alleles for the particular marker.

[0151] The present invention also provides certain risk genes that are predictive of whether certain humans are at increased risk of certain vascular conditions, i.e. abnormal ECG measures, Atrial Fibrillation, Atrial Flutter and/or Stroke. Thus, certain embodiments of the invention provide methods of determining susceptibility to one or more of these conditions by evaluating markers associated with a gene selected from the group consisting of: the human TBX5 gene, the human SCN10A gene, the human CAV1 gene, the human ARHGAP24 gene, the human CDKN1A gene and the human MYH6 gene. The assaying may in certain embodiments involve obtaining sequence data about a human individual identifying certain alleles at one or more of these markers, as further discussed herein.

[0152] In certain embodiments, the at least one marker associated with the human TBX5 gene is selected from the group consisting of rs3825214, and markers in linkage disequilibrium therewith; markers associated with the human SCN10A gene are selected from the group consisting of rs6795970, and markers in linkage disequilibrium therewith; markers associated with the human CAV1 gene are selected from the group consisting of rs3807989, and markers in linkage disequilibrium therewith; markers associated with the human ARHGAP24 gene are selected from the group consisting of rs7660702, and markers in linkage disequilibrium therewith; markers associated with the human CDKN1A gene are selected from the group consisting of rs132311, and markers in linkage disequilibrium therewith; and markers associated with the human MYH6 gene are selected from the group consisting of rs365990, and markers in linkage disequilibrium therewith.

[0153] Determination of the absence of at least one of the at-risk alleles recited above is indicative of a decreased risk of the condition for the human individual. As a consequence, in certain embodiments, the analyzing comprises determining the presence or absence of at least one at-risk allele of the polymorphic marker for the condition. In one preferred embodiment, the determination of the presence of a particular at-risk susceptibility allele is indicative of increased risk of the condition for the individual. Individuals who are homozygous for at-risk alleles are at particularly high risk. Thus, in certain embodiments determination of the presence of two alleles of one or more of the above-recited risk alleles is indicative of particularly high risk (susceptibility) of the condition.

[0154] Alternatively, the allele that is detected can be the allele of the complementary strand of DNA, such that the nucleic acid sequence data includes the identification of at least one allele which is complementary to any of the alleles of the polymorphic markers referenced above.

[0155] In certain embodiments, the nucleic acid sequence data is obtained from a biological sample containing nucleic acid from the human individual. The nucleic acids sequence may suitably be obtained using a method that comprises at least one procedure selected from (i) amplification of nucleic acid from the biological sample; (ii) hybridization assay using a nucleic acid probe and nucleic acid from the biological sample; and (iii) hybridization assay using a nucleic acid probe and nucleic acid obtained by amplification of the biological sample. The nucleic acid sequence data may also be obtained from a preexisting record. For example, the preexisting record may comprise a genotype dataset for at least one polymorphic marker. In certain embodiments, the determining comprises comparing the sequence data to a database containing correlation data between the at least one polymorphic marker and susceptibility to the condition.

[0156] It is contemplated that in certain embodiments of the invention, it may be convenient to prepare a report of results of risk assessment. Thus, certain embodiments of the methods of the invention comprise a further step of preparing a report containing results from the determination, wherein said report is written in a computer readable medium, printed on paper, or displayed on a visual display. In certain embodiments, it may be convenient to report results of susceptibility to at least one entity selected from the group consisting of the individual, a guardian of the individual, a genetic service provider, a physician, a medical organization, and a medical insurer.

### Risk Assessment and Diagnostics

[0157] Within any given population, there is an absolute risk of developing a disease or trait, defined as the chance of a person developing the specific disease or trait over a specified time-period. For example, a woman's lifetime absolute risk of breast cancer is one in nine. That is to say, one woman in every nine will develop breast cancer at some point in their lives. Risk is typically measured by looking at very large numbers of people, rather than at a particular individual. Risk is often presented in terms of Absolute Risk (AR) and Relative Risk (RR). Relative Risk is used to compare risks associating with two variants or the risks of two different groups of people. For example, it can be used to compare a group of people with a certain genotype with another group having a different genotype. For a disease, a relative risk of 2 means that one group has twice the chance of developing a disease as the other group. The risk presented is usually the relative risk for a person, or a specific genotype of a person, compared to the population with matched gender and ethnicity. Risks of two individuals of the same gender and ethnicity could be compared in a simple manner. For example, if, compared to the population, the first individual has relative risk 1.5 and the second has relative risk 0.5, then the risk of the first individual compared to the second individual is 1.5/0.5=3.

### Risk Calculations

[0158] The creation of a model to calculate the overall genetic risk involves two steps: i) conversion of odds-ratios for a single genetic variant into relative risk and ii) combination of risk from multiple variants in different genetic loci into a single relative risk value.

Deriving Risk from Odds-Ratios

[0159] Most gene discovery studies for complex diseases that have been published to date in authoritative journals have employed a case-control design because of their retrospective setup. These studies sample and genotype a selected set of cases (people who have the specified disease condition) and control individuals. The interest is in genetic variants (alleles) which frequency in cases and controls differ significantly.

[0160] The results are typically reported in odds ratios, that is the ratio between the fraction (probability) with the risk variant (carriers) versus the non-risk variant (non-carriers) in the groups of affected versus the controls, i.e. expressed in terms of probabilities conditional on the affection status:

OR=(Pr(c|A)/Pr(nc|A))/(Pr(c|C)/Pr(nc|C))

[0161] Sometimes it is however the absolute risk for the disease that we are interested in, i.e. the fraction of those individuals carrying the risk variant who get the disease or in other words the probability of getting the disease. This number cannot be directly measured in case-control studies, in part, because the ratio of cases versus controls is typically not the same as that in the general population. However, under certain assumption, we can estimate the risk from the odds ratio.

[0162] It is well known that under the rare disease assumption, the relative risk of a disease can be approximated by the odds ratio. This assumption may however not hold for many common diseases. Still, it turns out that the risk of one genotype variant relative to another can be estimated from the odds ratio expressed above. The calculation is particularly simple under the assumption of random population controls where the controls are random samples from the same population as the cases, including affected people rather than being strictly unaffected individuals. To increase sample size and power, many of the large genome-wide association and replication studies use controls that were neither age-matched with the cases, nor were they carefully scrutinized to ensure that they did not have the disease at the time of the study. Hence, while not exactly, they often approximate a random sample from the general population. It is noted that this assumption is rarely expected to be satisfied exactly, but the risk estimates are usually robust to moderate deviations from this assumption.

[0163] Calculations show that for the dominant and the recessive models, where we have a risk variant carrier, “c”, and a non-carrier, “nc”, the odds ratio of individuals is the same as the risk ratio between these variants:

OR=Pr(A|c)/Pr(A|nc)=r

[0164] And likewise for the multiplicative model, where the risk is the product of the risk associated with the two allele copies, the allelic odds ratio equals the risk factor:

OR=Pr(A|aa)/Pr(A|ab)=Pr(A|ab)/Pr(A|bb)=r

[0165] Here “a” denotes the risk allele and “b” the non-risk allele. The factor “r” is therefore the relative risk between the allele types.

[0166] For many of the studies published in the last few years, reporting common variants associated with complex diseases, the multiplicative model has been found to summarize the effect adequately and most often provide a fit to the data superior to alternative models such as the dominant and recessive models.

### The Risk Relative to the Average Population Risk

[0167] It is most convenient to represent the risk of a genetic variant relative to the average population since it makes it easier to communicate the lifetime risk for developing the disease compared with the baseline population risk. For example, in the multiplicative model we can calculate the relative population risk for variant “aa” as:

RR(aa)=Pr(A|aa)/Pr(A)=(Pr(A|aa)/Pr(A|bb))/(Pr(A)/Pr(A|bb))=r²/(Pr(aa)r²+Pr(ab)r+Pr(bb))=r²/(p²r²+2pqr+q²)=r²/R

[0168] Here “p” and “q” are the allele frequencies of “a” and “b” respectively. Likewise, we get that RR(ab)=r/R and RR(bb)=1/R. The allele frequency estimates may be obtained from the publications that report the odds-ratios and from the HapMap database. Note that in the case where we do not know the genotypes of an individual, the relative genetic risk for that test or marker is simply equal to one.

[0169] As an example, for Atrial Fibrillation risk, allele A of marker rs3825214 has an allelic OR of 1.14 and a frequency (p) around 0.80 in Caucasian populations. The genotype relative risk compared to genotype GG are estimated based on the multiplicative model.

[0170] For AA it is 1.14×1.14=1.30; for AG it is simply the OR 1.14, and for GG it is 1.0 by definition.

[0171] The frequency of allele G is q=1−p=1−0.80=0.20. Population frequency of each of the three possible genotypes at this marker is:

Pr(AA)=p²=0.64, Pr(AG)=2pq=0.32, and Pr(GG)=q²=0.04

[0172] The average population risk relative to genotype GG (which is defined to have a risk of one) is:

R=0.64×1.30+0.32×1.14+0.04×1=1.24

[0173] Therefore, the risk relative to the general population (RR) for individuals who have one of the following genotypes at this marker is:

RR(AA)=1.30/1.24=1.05, RR(AG)=1.14/1.24=0.92, RR(GG)=1/1.24=0.81.

Combining the Risk from Multiple Markers

[0174] When genotypes of many SNP variants are used to estimate the risk for an individual a multiplicative model for risk can generally be assumed. This means that the combined genetic risk relative to the population is calculated as the product of the corresponding estimates for individual markers, e.g. for two markers g1 and g2:

RR(g1,g2)=RR(g1)RR(g2)

[0175] The underlying assumption is that the risk factors occur and behave independently, i.e. that the joint conditional probabilities can be represented as products:

Pr(A|g1,g2)=Pr(A|g1)Pr(A|g2)/Pr(A) and Pr(g1,g2)=Pr(g1)Pr(g2)

[0176] Obvious violations to this assumption are markers that are closely spaced on the genome, i.e. in linkage disequilibrium, such that the concurrence of two or more risk alleles is correlated. In such cases, we can use so called haplotype modeling where the odds-ratios are defined for all allele combinations of the correlated SNPs.

[0177] As is in most situations where a statistical model is utilized, the model applied is not expected to be exactly true since it is not based on an underlying bio-physical model. However, the multiplicative model has so far been found to fit the data adequately, i.e. no significant deviations are detected for many common diseases for which many risk variants have been discovered.

[0178] As an example, an individual who has the following genotypes at 4 hypothetical markers associated with a particular disease along with the risk relative to the population at each marker:

| Marker | Genotype | Calculated risk |
|---|---|---|
| M1 | CC | 1.03 |
| M2 | GG | 1.30 |
| M3 | AG | 0.88 |
| M4 | TT | 1.54 |

[0179] Combined, the overall risk relative to the population for this individual is:

1.03×1.30×0.88×1.54=1.81.

### Adjusted Life-Time Risk

[0180] The lifetime risk of an individual is derived by multiplying the overall genetic risk relative to the population with the average life-time risk of the disease in the general population of the same ethnicity and gender and in the region of the individual's geographical origin. As there are usually several epidemiologic studies to choose from when defining the general population risk, we will pick studies that are well-powered for the disease definition that has been used for the genetic variants.

[0181] For example, if the overall genetic risk relative to the population for a particular disease or trait is 1.8, and if the average life-time risk of the disease is 20%, then the adjusted lifetime risk is 20%×1.8=36%.

[0182] Note that since the average RR for a population is one, this multiplication model provides the same average adjusted life-time risk of the disease. Furthermore, since the actual life-time risk cannot exceed 100%, there must be an upper limit to the genetic RR.

### Risk Assessment

[0183] As described herein, certain polymorphic markers and haplotypes comprising such markers are found to be useful for risk assessment of certain vascular conditions, including abnormal electrocardiogram measures, Atrial Fibrillation, Atrial Flutter and Stroke. Risk assessment can involve the use of the markers for determining a susceptibility to a particular condition. Particular alleles of certain polymorphic markers are found more frequently in individuals with the condition, than in individuals without the condition. Therefore, these marker alleles have predictive value for detecting the condition, or a susceptibility to the condition, in an individual. Markers in linkage disequilibrium with risk variants (or protective variants) can be used as surrogates for these markers (and/or haplotypes). Such surrogate markers can for example be located within a particular haplotype block or LD block. Such surrogate markers can also sometimes be located outside the physical boundaries of such a haplotype block or LD block, either in close vicinity of the LD block/haplotype block, but possibly also located in a more distant genomic location.

[0184] Long-distance LD can for example arise if particular genomic regions (e.g., genes) are in a functional relationship. For example, if two genes encode proteins that play a role in a shared metabolic pathway, then particular variants in one gene may have a direct impact on observed variants for the other gene. Let us consider the case where a variant in one gene leads to increased expression of the gene product. To counteract this effect and preserve overall flux of the particular pathway, this variant may have led to selection of one (or more) variants at a second gene that confers decreased expression levels of that gene. These two genes may be located in different genomic locations, possibly on different chromosomes, but variants within the genes are in apparent LD, not because of their shared physical location within a region of high LD, but rather due to evolutionary forces. Such LD is also contemplated and within scope of the present invention. The skilled person will appreciate that many other scenarios of functional gene-gene interaction are possible, and the particular example discussed here represents only one such possible scenario.

[0185] Markers with values of r² equal to 1 are perfect surrogates for the at-risk variants (anchor variants), i.e. genotypes for one marker perfectly predicts genotypes for the other. Markers with smaller values of r² than 1 (e.g., markers with values of r² to the marker of 0.2-1.0) can also be surrogates for the at-risk variant, or alternatively represent variants with relative risk values as high as or possibly even higher than the at-risk variant. In certain preferred embodiments, markers with values of r² greater than 0.2 to the at-risk anchor variant are useful surrogate markers. The at-risk variant identified may not be the functional variant itself, but is in this instance in linkage disequilibrium with the true functional variant. The functional variant may be a SNP, but may also for example be a tandem repeat, such as a minisatellite or a microsatellite, a transposable element (e.g., an Alu element), or a structural alteration, such as a deletion, insertion or inversion (sometimes also called copy number variations, or CNVs). The present invention encompasses the assessment of such surrogate markers for the markers as disclosed herein. Such markers are annotated, mapped and listed in public databases, as well known to the skilled person, or can alternatively be readily identified by sequencing the region or a part of the region identified by the markers of the present invention in a group of individuals, and identify polymorphisms in the resulting group of sequences. As a consequence, the person skilled in the art can readily and without undue experimentation identify and genotype surrogate markers in linkage disequilibrium with the markers and/or haplotypes as described herein. The tagging or surrogate markers in LD with the at-risk variants detected also have predictive value.

[0186] The present invention can in certain embodiments be practiced by assessing a sample comprising genomic DNA from an individual for the presence of certain variants described herein. Such assessment typically steps that detect the presence or absence of at least one allele of at least one polymorphic marker, using methods well known to the skilled person and further described herein, and based on the outcome of such assessment, determine whether the individual from whom the sample is derived is at increased or decreased risk (i.e., increased or decreased susceptibility) of a particular condition. Detecting particular alleles of polymorphic markers can in certain embodiments be done by obtaining nucleic acid sequence data about a particular human individual, that identifies at least one allele of at least one polymorphic marker. Different alleles of the at least one marker are associated with different susceptibility to the disease in humans. Obtaining nucleic acid sequence data can comprise nucleic acid sequence at a single nucleotide position, which is sufficient to identify alleles at SNPs. The nucleic acid sequence data can also comprise sequence at any other number of nucleotide positions, in particular for genetic markers that comprise multiple nucleotide positions, and can be anywhere from two to hundreds of thousands, possibly even millions, of nucleotides (in particular, in the case of copy number variations (CNVs)).

[0187] In certain embodiments, the invention can be practiced utilizing a dataset comprising information about the genotype status of at least one polymorphic marker associated with a disease (or markers in linkage disequilibrium with at least one marker associated with the disease). In other words, a dataset containing information about such genetic status, for example in the form of genotype counts at a certain polymorphic marker, or a plurality of markers (e.g., an indication of the presence or absence of certain at-risk alleles), or actual genotypes for one or more markers, can be queried for the presence or absence of certain at-risk alleles at certain polymorphic markers shown by the present inventors to be associated with the disease. A positive result for a variant (e.g., marker allele) associated with the disease, is indicative of the individual from which the dataset is derived is at increased susceptibility (increased risk) of the disease.

[0188] In certain embodiments of the invention, a polymorphic marker is correlated to a disease by referencing genotype data for the polymorphic marker to a database, such as a look-up table, that comprises correlation data between at least one allele of the polymorphism and the disease. In some embodiments, the table comprises a correlation for one polymorphism. In other embodiments, the table comprises a correlation for a plurality of polymorphisms. In both scenarios, by referencing to a look-up table that gives an indication of a correlation between a marker and the disease, a risk for the disease, or a susceptibility to the disease, can be identified in the individual from whom the sample is derived. In some embodiments, the correlation is reported as a statistical measure. The statistical measure may be reported as a risk measure, such as a relative risk (RR), an absolute risk (AR) or an odds ratio (OR).

[0189] Risk markers may be useful for risk assessment and diagnostic purposes, either alone or in combination. Results of disease risk assessment based on the markers described herein can also be combined with data for other genetic markers or risk factors for the disease, to establish overall risk. Thus, even in cases where the increase in risk by individual markers is relatively modest, e.g. on the order of 10-30%, the association may have significant implications when combined with other risk markers. Thus, relatively common variants may have significant contribution to the overall risk (Population Attributable Risk is high), or combination of markers can be used to define groups of individual who, based on the combined risk of the markers, is at significant combined risk of developing the disease or condition.

[0190] Thus, in certain embodiments of the invention, a plurality of variants (genetic markers, biomarkers and/or haplotypes) is used for overall risk assessment. These variants are in one embodiment selected from the variants as disclosed herein. Other embodiments include the use of the variants of the present invention in combination with other variants known to be useful for diagnosing a susceptibility to vascular conditions that include one or more electrocardiogram measure, Atrial Fibrillation, Atrial Flutter and/or Stroke. In such embodiments, the genotype status of a plurality of markers and/or haplotypes is determined in an individual, and the status of the individual compared with the population frequency of the associated variants, or the frequency of the variants in clinically healthy subjects, such as age-matched and sex-matched subjects. Methods known in the art, such as multivariate analyses or joint risk analyses, such as those described herein, or other methods known to the skilled person, may subsequently be used to determine the overall risk conferred based on the genotype status at the multiple loci. Assessment of risk based on such analysis may subsequently be used in the methods, uses and kits of the invention, as described herein.

### Study Population

[0191] In a general sense, the methods and kits described herein can be utilized from samples containing nucleic acid material (DNA or RNA) from any source and from any individual, or from genotype or sequence data derived from such samples. In preferred embodiments, the individual is a human individual. The individual can be an adult, child, or fetus. The nucleic acid source may be any sample comprising nucleic acid material, including biological samples, or a sample comprising nucleic acid material derived therefrom. The present invention also provides for assessing markers and/or haplotypes in individuals who are members of a target population. Such a target population is in one embodiment a population or group of individuals at risk of developing a particular condition, based on other genetic factors, biomarkers, biophysical parameters (e.g., weight, BMD, blood pressure), or general health and/or lifestyle parameters (e.g., history of the condition or related condition, previous diagnosis of the condition, family history of the condition).

[0192] The invention provides for embodiments that include individuals from specific age subgroups, such as those over the age of 40, over age of 45, or over age of 50, 55, 60, 65, 70, 75, 80, or 85. Other embodiments of the invention pertain to other age groups, such as individuals aged less than 85, such as less than age 80, less than age 75, or less than age 70, 65, 60, 55, 50, 45, 40, 35, or age 30. Other embodiments relate to individuals with age at onset of the condition in any of the age ranges described in the above. It is also contemplated that a range of ages may be relevant in certain embodiments, such as age at onset at more than age 45 but less than age 60. Other age ranges are however also contemplated, including all age ranges bracketed by the age values listed in the above. The invention furthermore relates to individuals of either gender, males or females.

[0193] The Icelandic population is a Caucasian population of Northern European ancestry. A large number of studies reporting results of genetic linkage and association in the Icelandic population have been published in the last few years. Many of those studies show replication of variants, originally identified in the Icelandic population as being associating with a particular disease, in other populations (Sulem, P., et al. Nat Genet May 17, 2009 (Epub ahead of print); Rafnar, T., et al. Nat Genet. 41:221-7 (2009); Gretarsdottir, S., et al. Ann Neurol 64:402-9 (2008); Stacey, S, N., et al. Nat Genet. 40:1313-18 (2008); Gudbjartsson, D. F., et al. Nat Genet. 40:886-91 (2008); Styrkarsdottir, U., et al. N Engl J Med 358:2355-65 (2008); Thorgeirsson, T., et al. Nature 452:638-42 (2008); Gudmundsson, 3., et al. Nat. Genet. 40:281-3 (2008); Stacey, S, N., et al., Nat. Genet. 39:865-69 (2007); Helgadottir, A., et al., Science 316:1491-93 (2007); Steinthorsdottir, V., et al., Nat. Genet. 39:770-75 (2007); Gudmundsson, 3., et al., Nat. Genet. 39:631-37 (2007); Frayling, T M, Nature Reviews Genet. 8:657-662 (2007); Amundadottir, L. T., et al., Nat. Genet. 38:652-58 (2006); Grant, S. F., et al., Nat. Genet. 38:320-23 (2006)). Thus, genetic findings in the Icelandic population have in general been replicated in other populations, including populations from Africa and Asia.

[0194] It is thus believed that the markers described herein will show similar association profiles in other human populations. Particular embodiments comprising individual human populations are thus also contemplated and within the scope of the invention. Such embodiments relate to human subjects that are from one or more human population including, but not limited to, Caucasian populations, European populations, American populations, Eurasian populations, Asian populations, Central/South Asian populations, East Asian populations, Middle Eastern populations, African populations, Hispanic populations, and Oceanian populations. European populations include, but are not limited to, Swedish, Norwegian, Finnish, Russian, Danish, Icelandic, Irish, Kelt, English, Scottish, Dutch, Belgian, French, German, Spanish, Portuguese, Italian, Polish, Bulgarian, Slavic, Serbian, Bosnian, Czech, Greek and Turkish populations.

[0195] The racial contribution in individual subjects may also be determined by genetic analysis. Genetic analysis of ancestry may be carried out using unlinked microsatellite markers such as those set out in Smith et al. (Am J Hum Genet. 74, 1001-13 (2004)).

[0196] In certain embodiments, the invention relates to markers and/or haplotypes identified in specific populations, as described in the above. The person skilled in the art will appreciate that measures of linkage disequilibrium (LD) may give different results when applied to different populations. This is due to different population history of different human populations as well as differential selective pressures that may have led to differences in LD in specific genomic regions. It is also well known to the person skilled in the art that certain markers, e.g. SNP markers, have different population frequency in different populations, or are polymorphic in one population but not in another. The person skilled in the art will however apply the methods available and as thought herein to practice the present invention in any given human population. This may include assessment of polymorphic markers in the LD region of the present invention, so as to identify those markers that give strongest association within the specific population. Thus, the at-risk variants of the present invention may reside on different haplotype background and in different frequencies in various human populations. However, utilizing methods known in the art and the markers of the present invention, the invention can be practiced in any given human population.

### Utility of Genetic Testing

[0197] The person skilled in the art will appreciate and understand that the risk variants described herein in general do not, by themselves, provide an absolute identification of individuals who will develop a particular condition. The variants described herein do however indicate increased and/or decreased likelihood that individuals carrying the at-risk or protective variants of the invention will develop the condition. The present inventors have discovered that certain variants confer risk of developing certain vascular condition (e.g., abnormal ECG measures, Atrial Fibrillation, Atrial Flutter, Stroke), as supported by the results presented in the Exemplification herein. This information is extremely valuable in itself, as outlined in more detail in the below, as it can be used to, for example, initiate preventive measures at an early stage, perform regular physical exams to monitor the progress and/or appearance of symptoms, or to schedule exams at a regular interval to identify early symptoms, so as to be able to apply treatment at an early stage.

[0198] Genetic testing may be useful for selecting appropriate work-up for individuals presenting with subtle cardiac symptoms. A genetic test that identifies an individual at-risk for abnormal ECG and/or at-risk for Atrial Fibrillation, Atrial Flutter and/or stroke may be used to select the appropriate work-up in the clinic. Thus, individuals who carry one or more genetic risk factors for an abnormal ECG measure and/or Atrial Fibrillation, Atrial Flutter and/or stroke, using any one, or a combination of, the markers described herein, would undergo a more thorough work-up. Thus, genetic testing may be used to determine the aggressiveness of the clinical work-up of individual who present with vague or unclear initial symptoms.

[0199] Genetic testing may also be useful for therapy choice. It is known that calcium and beta blockers may predispose to increased PR interval in humans. Thus, individuals determined to be at increased genetic risk for increased PR interval using any one or a combination of the markers described herein may be given alternative therapy upon presentation of Atrial Fibrillation and/or Atrial Flutter, to minimize the adverse reaction of an increased PR interval caused by calcium and beta blockers.

[0200] Heart blocks can usually be diagnosed using ECG. Symtpoms associated with heart block depend on the severity of the conduction disturbance and may range from a lack of apparent symptoms to syncope (fainting) and life-threatening collapse. For individuals with intermittent heart-block, symptoms may be more subtle, and hence the diagnosis is not straightforward. Genetic testing can be used to identify those individuals at increased risk of heart block, (e.g., individuals determined as being at elevated risk of heart block using any one, or a combination of, the markers described herein) who may then be chosen for a more extensive clinical work-up to identify underlying heart block.

[0201] The present invention relates to risk assessment for vascular conditions such as abnormal ECG measures, cardiac arrhythmia (e.g., atrial fibrillation or atrial flutter) and/or stroke, including determining whether an individual is at risk for developing cardiac arrhythmia (e.g., atrial fibrillation or atrial flutter) and/or stroke. The markers of the present invention can be used alone or in combination, as well as in combination with other factors, including other genetic risk factors or biomarkers, for risk assessment of an individual for these conditions. Many factors known to affect the predisposition of an individual towards vascular conditions are known to the person skilled in the art and can be utilized in such assessment. These include, but are not limited to, age, gender, smoking status, physical activity, waist-to-hip circumference ratio, family history of cardiac arrhythmia or an abnormal ECG measure (in particular atrial fibrillation and/or atrial flutter) and/or stroke, previously diagnosed cardiac arrhythmia (e.g., atrial fibrillation or atrial flutter), abnormal ECG measure and/or stroke, obesity, hypertriglyceridemia, low HDL cholesterol, hypertension, elevated blood pressure, cholesterol levels, HDL cholesterol, LDL cholesterol, triglycerides, apolipoprotein AI and B levels, fibrinogen, ferritin, C-reactive protein and leukotriene levels. Particular biomarkers that have been associated with Atrial fibrillation/Atrial flutter and stroke are discussed in Allard et al. (Clin Chem 51:2043-2051 (2005) and Becker (J Thromb Thrombolys 19:71-75 (2005)). These include, but are not limited to, fibrin D-dimer, prothrombin activation fragment 1.2 (F1.2), thrombin-antithrombin III complexes (TAT), fibrinopeptide A (FPA), lipoprotein-associated phospholipase A2 (Ip-PLA2), beta-thromboglobulin, platelet factor 4, P-selectin, von Willebrand Factor, pro-natriuretic peptide (BNP), matrix metalloproteinase-9 (MMP-9), PARK7, nucleoside diphosphate kinase (NDKA), tau, neuron-specific enolase, B-type neurotrophic growth factor, astroglial protein S-100b, glial fibrillary acidic protein, C-reactive protein, seum amyloid A, marix metalloproteinase-9, vascular and intracellular cell adhesion molecules, tumor necrosis factor alpha, and interleukins, including interleukin-1, -6, and -8). Circulating progenitor cells have also been implicated as being useful biomarkers for AF. In particular embodiments, more than one biomarker is determined for an individual, and combined with results of a determination of at least one polymorphic marker as described herein. Preferably, biomarker is measured in plasma or serum from the individual.

[0202] Alternatively, the biomarker is determined in other suitable tissues containing measurable amounts of the biomarker, and such embodiments are also within scope of the invention.

[0203] Methods known in the art can be used for overall risk assessment, including multivariate analyses or logistic regression.

[0204] Atrial fibrillation is a disease of great significance both to the individual patient and to the health care system as a whole. It can be a permanent condition but may also be paroxysmal and recurrent in which case it can be very challenging to diagnose. The most devastating complication of atrial fibrillation and atrial flutter is the occurrence of debilitating stroke. Importantly the risk of stroke is equal in permanent and paroxysmal atrial fibrillation. It has repeatedly been shown that therapy with warfarin anticoagulation can significantly reduce the risk of first or further episodes of stroke in the setting of atrial fibrillation. Therefor, anticoagulation with warfarin is standard therapy for almost all patients with atrial fibrillation for stroke-prevention, whether they have the permanent or paroxysmal type. The only patients for whom warfarin is not strongly recommended are those younger than 65 years old who are considered low-risk, i.e., they have no organic heart disease, including, neither hypertension no coronary artery disease, no previous history of stroke or transient ischemic attacks and no diabetes. This group has a lower risk of stroke and stroke-prevention with aspirin is recommended.

[0205] Due to the nature of paroxysmal atrial fibrillation, it can be very difficult to diagnose. When the patient seeks medical attention due to disease-related symptoms, such as palpitations, chest pain, shortness of breath, dizziness, heart failure, transient ischemic attacks or even stroke, normal heart rhythm may already be restored precluding diagnosis of the arrhythmia. In these cases cardiac rhythm monitoring is frequently applied in the attempt to diagnose the condition. The cardiac rhythm is commonly monitored continuously for 24 to 48 hours. Unfortunately atrial fibrillation episodes are unpredictable and frequently missed by this approach. The opportunity to diagnose the arrhythmia, institute recommended therapy, and possibly prevent a debilitating first or recurrent stroke may be missed with devastating results to the patient. Prolonged and more complex cardiac rhythm monitoring measures are available and applied occasionally when the suspicion of atrial fibrillation is very strong. These tests are expensive, the diagnostic yield with current approach is often low, and they are used sparingly for this indication. In these circumstances additional risk stratification with genetic testing may be extremely helpful. Understanding that the individual in question carries either an at-risk or a protective genetic variant can be an invaluable contribution to diagnostic and/or treatment decision making. This way, in some cases, unnecessary testing and therapy may be avoided, and in other cases, with the help of more aggressive diagnostic approach, the arrhythmia may be diagnosed and/or proper therapy initiated and later complications of disease diminished.

### How Genetic Testing May Directly Affect Choice of Treatment

[0206] When individuals present with their first (diagnosed) episode of paroxysmal atrial fibrillation and either spontaneously convert to sinus rhythm or undergo electrical or chemical cardioversion less than 48 hours into the episode, the decision to initiate, or not to initiate, anticoagulation therapy, is individualized based on the risk profile of the patient in question and the managing physicians preference. This can be a difficult choice to make since committing the patient to anticoagulation therapy has a major impact on the patients life. Often the choice is made to withhold anticoagulation in such a situation and this may be of no significant consequence to the patient. On the other hand the patient may later develop a stroke and the opportunity of prevention may thus have been missed. In such circumstances, knowing that the patient is a carrier of the at-risk variant may be of great significance and support initiation of anticoagulation treatment.

[0207] Individuals who are diagnosed with atrial fibrillation under the age of 65 and are otherwise considered low risk for stroke, i.e. have no organic heart disease, no hypertension, no diabetes and no previous history of stroke, are generally treated with aspirin only for stroke-prevention and not anticoagulation. If such a patient is found to be carrier for any one, or a combination of, the at-risk variants described herein, this could be considered support for initiating anticoagulation earlier than otherwise recommended. This would be a reasonable consideration since the results of stroke from atrial fibrillation can be devastating.

[0208] Ischemic stroke is generally classified into five subtypes based on suspected cause; large artery atherosclerosis, small artery occlusion, cardioembolism (majority due to atrial fibrillation), stroke of other determined cause and stroke of undetermined cause (either no cause found or more than one plausible cause). Importantly, stroke due to cardioembolism has the highest recurrence, is most disabling and is associated with the lowest survival. It is therefore imperative not to overlook atrial fibrillation as the major cause of stroke, particularly since treatment measures vary based on the subtype. Therefore, if an individual is diagnosed with stroke or a transient ischemic attack and a plausible cause is not identified despite standard work-up, knowing that the patient is a carrier of the at-risk variant may be of great value and support either initiation of anticoagulation treatment or more aggressive diagnostic testing in the attempt to diagnose atrial fibrillation.

[0209] Furthermore, the markers of the present invention can be used to increase power and effectiveness of clinical trials. Thus, individuals who are carriers of at least one at-risk variant of the present invention, i.e. individuals who are carriers of at least one allele of at least one polymorphic marker conferring increased risk of developing cardiac arrhythmia (e.g., atrial fibrillation or atrial flutter) and/or stroke may be more likely to respond to a particular treatment modality, e.g., as described in the above. In one embodiment, individuals who carry at-risk variants for gene(s) in a pathway and/or metabolic network for which a particular treatment (e.g., small molecule drug) is targeting, are more likely to be responders to the treatment. In another embodiment, individuals who carry at-risk variants for a gene, which expression and/or function is altered by the at-risk variant, are more likely to be responders to a treatment modality targeting that gene, its expression or its gene product. This application can improve the safety of clinical trials, but can also enhance the chance that a clinical trial will demonstrate statistically significant efficacy, which may be limited to a certain sub-group of the population. Thus, one possible outcome of such a trial is that carriers of certain genetic variants, e.g., the markers and haplotypes of the present invention, are statistically significantly likely to show positive response to the therapeutic agent, i.e. experience alleviation of symptoms associated with cardiac arrhythmia (e.g., atrial fibrillation or atrial flutter) and/or stroke when taking the therapeutic agent or drug as prescribed.

[0210] In a further aspect, the markers and haplotypes of the present invention can be used for targeting the selection of pharmaceutical agents for specific individuals. Personalized selection of treatment modalities, lifestyle changes or combination of the two, can be realized by the utilization of the at-risk variants of the present invention. Thus, the knowledge of an individual's status for particular markers of the present invention, can be useful for selection of treatment options that target genes or gene products affected by the at-risk variants of the invention. Certain combinations of variants may be suitable for one selection of treatment options, while other gene variant combinations may target other treatment options. Such combination of variant may include one variant, two variants, three variants, or four or more variants, as needed to determine with clinically reliable accuracy the selection of treatment module.

### Diagnostic and Screening Methods

[0211] In certain embodiments, the present invention pertains to methods of diagnosing, or aiding in the diagnosis of, certain vascular conditions or a susceptibility to the conditions, by detecting particular alleles at genetic markers that appear more frequently in subjects with the conditions or subjects who are susceptible to the conditions. In a particular embodiment, the invention is a method of determining a susceptibility to these conditions by detecting at least one allele of at least one polymorphic marker. In certain other embodiments, the invention relates to a method of determining a susceptibility to these conditions by detecting at least one allele of at least one polymorphic marker. The present invention describes methods whereby detection of particular alleles of particular markers or haplotypes is indicative of a susceptibility to these vascular conditions.

[0212] The present invention pertains in some embodiments to methods of clinical applications of diagnosis, e.g., diagnosis performed by a medical professional. In other embodiments, the invention pertains to methods of diagnosis or methods of determination of a susceptibility performed by a layman. The layman can be the customer of a genotyping service. The layman may also be a genotype service provider, who performs genotype analysis on a DNA sample from an individual, in order to provide service related to genetic risk factors for particular traits or diseases, based on the genotype status of the individual (i.e., the customer). Recent technological advances in genotyping technologies, including high-throughput genotyping of SNP markers, such as Molecular Inversion Probe array technology (e.g., Affymetrix GeneChip), and BeadArray Technologies (e.g., Illumina GoldenGate and Infinium assays) have made it possible for individuals to have their own genome assessed for up to one million SNPs simultaneously, at relatively little cost. The resulting genotype information, which can be made available to the individual, can be compared to information about disease or trait risk associated with various SNPs, including information from public literature and scientific publications. The diagnostic application of disease-associated alleles as described herein, can thus for example be performed by the individual, through analysis of his/her genotype data, by a health professional based on results of a clinical test, or by a third party, including the genotype service provider. The third party may also be service provider who interprets genotype information from the customer to provide service related to specific genetic risk factors, including the genetic markers described herein. In other words, the diagnosis or determination of a susceptibility of genetic risk can be made by health professionals, genetic counselors, third parties providing genotyping service, third parties providing risk assessment service or by the layman (e.g., the individual), based on information about the genotype status of an individual and knowledge about the risk conferred by particular genetic risk factors (e.g., particular SNPs). In the present context, the term “diagnosing”, “diagnose a susceptibility” and “determine a susceptibility” is meant to refer to any available diagnostic method, including those mentioned above.

[0213] In certain embodiments, a sample containing genomic DNA from an individual is collected. Such sample can for example be a buccal swab, a saliva sample, a blood sample, or other suitable samples containing genomic DNA, as described further herein. The genomic DNA is then analyzed using any common technique available to the skilled person, such as high-throughput array technologies. Results from such genotyping are stored in a convenient data storage unit, such as a data carrier, including computer databases, data storage disks, or by other convenient data storage means. In certain embodiments, the computer database is an object database, a relational database or a post-relational database. The genotype data is subsequently analyzed for the presence of certain variants known to be susceptibility variants for a particular human conditions, such as the genetic variants described herein. Genotype data can be retrieved from the data storage unit using any convenient data query method. Calculating risk conferred by a particular genotype for the individual can be based on comparing the genotype of the individual to previously determined risk (expressed as a relative risk (RR) or and odds ratio (OR), for example) for the genotype, for example for an heterozygous carrier of an at-risk variant for a particular disease or trait. The calculated risk for the individual can be the relative risk for a person, or for a specific genotype of a person, compared to the average population with matched gender and ethnicity. The average population risk can be expressed as a weighted average of the risks of different genotypes, using results from a reference population, and the appropriate calculations to calculate the risk of a genotype group relative to the population can then be performed. Alternatively, the risk for an individual is based on a comparison of particular genotypes, for example heterozygous carriers of an at-risk allele of a marker compared with non-carriers of the at-risk allele. Using the population average may in certain embodiments be more convenient, since it provides a measure which is easy to interpret for the user, i.e. a measure that gives the risk for the individual, based on his/her genotype, compared with the average in the population. The calculated risk estimated can be made available to the customer via a website, preferably a secure website.

[0214] In certain embodiments, a service provider will include in the provided service all of the steps of isolating genomic DNA from a sample provided by the customer, performing genotyping of the isolated DNA, calculating genetic risk based on the genotype data, and report the risk to the customer. In some other embodiments, the service provider will include in the service the interpretation of genotype data for the individual, i.e., risk estimates for particular genetic variants based on the genotype data for the individual. In some other embodiments, the service provider may include service that includes genotyping service and interpretation of the genotype data, starting from a sample of isolated DNA from the individual (the customer).

[0215] Overall risk for multiple risk variants can be performed using standard methodology. For example, assuming a multiplicative model, i.e. assuming that the risk of individual risk variants multiply to establish the overall effect, allows for a straight-forward calculation of the overall risk for multiple markers.

[0216] In addition, in certain other embodiments, the present invention pertains to methods of determining a decreased susceptibility to particular vascular conditions, by detecting particular genetic marker alleles or haplotypes that appear less frequently in subjects with the conditions than in individuals that do not have the conditions, or in the general population.

[0217] As described and exemplified herein, particular marker alleles or haplotypes are associated with risk of certain vascular conditions. In one embodiment, the marker allele or haplotype is one that confers a significant risk or susceptibility to the condition. In another embodiment, the invention relates to a method of determining a susceptibility to the condition in a human individual, the method comprising determining the presence or absence of at least one allele of at least one polymorphic marker in a nucleic acid sample obtained from the individual. In another embodiment, the invention pertains to methods of determining a susceptibility to the vascular condition in a human individual, by screening for at least one marker allele or haplotype as described herein. In another embodiment, the marker allele or haplotype is more frequently present in a subject having, or who is susceptible to, the vascular condition (affected), as compared to the frequency of its presence in a healthy subject (control, such as population controls). In certain embodiments, the significance of association of the at least one marker allele or haplotype is characterized by a p value<0.05. In other embodiments, the significance of association is characterized by smaller p-values, such as <0.01, <0.001, <0.0001, <0.00001, <0.000001, <0.0000001, <0.00000001 or <0.000000001.

[0218] Determining risk or susceptibility in certain embodiments includes steps of obtaining sequence data that identifies at least one allele of at least one polymorphic marker. In other words, the sequence data identifies the nucleotide that is present at a particular site in the genome of the individual, thus identifying a particular allele at that site. The sequence information may optionally be represented as digital genetic profile data. Such genetic profile data may for example be in the form of allelic counts at particular polymorphic sites, in the form of the allelic identity at the particular sites or in other convenient form. The data is then suitably transformed so as to obtain a risk measure. The transformation may suitably performed on a processor, such as a computer processor on a computer system. The transformation typically involves an assessment of genetic risk associated with the allelic identity at one or more polymorphic sites (i.e., genotypes at the particular sites). Such risk assessment utilizes risk measures obtained by performing a comparison of the genetic composition of individuals with the particular condition (affecteds) to a reference group (controls) for the particular polymorphic site. The present inventors have identified certain risk markers for vascular conditions using such an approach. Risk for an individual involves comparing the individual's genotype to the risk conferred by the genotype based on a risk analysis of affecteds as compared with controls, and calculating a genetic risk for the individual based on the estimated risk for his/her genotype. The risk assessment may be based on assessment of a single polymorphic site. Alternatively, the risk assessment involves an analysis of multiple polymorphic sites, as further described herein. Results of risk assessment for an individual are then reported to the individual or a third party using any convenient method or a convenient output device. The output device is in one embodiment located on a computer server, which can be accessed remotely by the user, preferably using user-restricted access. The output device may also be a printer, which delivers a printed report which is then forwarded to the user or a third party.

[0219] In these embodiments, determination of the presence of the at least one marker allele or haplotype is indicative of a susceptibility to the particular vascular condition. The diagnostic methods involve determining whether particular alleles or haplotypes that are associated with risk of the condition are present in particular individuals, and calculate a risk measure for the individual based on the result of such determination. For multiple markers, methods of determining overall risk can be used, as described further herein. The detection of particular genetic marker alleles can be performed by a variety of methods described herein and/or known in the art. For example, genetic markers can be detected at the nucleic acid level (e.g., by direct nucleotide sequencing, or by other genotyping means known to the skilled in the art) or at the amino acid level if the genetic marker affects the coding sequence of a protein (e.g., by protein sequencing or by immunoassays using antibodies that recognize such a protein). Marker alleles correspond to fragments of a genomic segments (e.g., genes) associated with a condition (disease or trait). Such fragments encompass the DNA sequence of the polymorphic marker in question, but may also include DNA segments in strong LD (linkage disequilibrium) with the marker. In one embodiment, such fragments comprises segments in LD with the marker or haplotype as determined by a value of r² greater than 0.2 and/or |D′|>0.8).

[0220] In one embodiment, determination of a susceptibility can be accomplished using hybridization methods. (see Current Protocols in Molecular Biology, Ausubel, F. et al., eds., John Wiley & Sons, including all supplements). The presence of a specific marker allele can be indicated by sequence-specific hybridization of a nucleic acid probe specific for the particular allele. The presence of more than one specific marker allele or a specific haplotype can be indicated by using several sequence-specific nucleic acid probes, each being specific for a particular allele. A sequence-specific probe can be directed to hybridize to genomic DNA, RNA, or cDNA. A “nucleic acid probe”, as used herein, can be a DNA probe or an RNA probe that hybridizes to a complementary sequence. One of skill in the art would know how to design such a probe so that sequence specific hybridization will occur only if a particular allele is present in a genomic sequence from a test sample. The invention can also be reduced to practice using any convenient genotyping method, including commercially available technologies and methods for genotyping particular polymorphic markers.

[0221] To determine a susceptibility to a condition, a hybridization sample can be formed by contacting the test sample, such as a genomic DNA sample, with at least one nucleic acid probe. A non-limiting example of a probe for detecting mRNA or genomic DNA is a labeled nucleic acid probe that is capable of hybridizing to mRNA or genomic DNA sequences described herein. The nucleic acid probe can be, for example, a full-length nucleic acid molecule, or a portion thereof, such as an oligonucleotide of at least 15, 30, 50, 100, 180, 250 or 500 nucleotides in length that is sufficient to specifically hybridize under stringent conditions to appropriate mRNA or genomic DNA. In certain embodiments, the oligonucleotide is from about 15 to about 100 nucleotides in length. In certain other embodiments, the oligonucleotide is from about 20 to about 50 nucleotides in length. The nucleic acid probe can comprise all or a portion of the nucleotide sequence of a particular LD block, e.g., any one of LD block C03, LD block C04, LD block C06, LD block C07, LD block C10, LD block C12 and LD block C14, as described herein, optionally comprising at least one allele of a marker described herein, or the probe can be the complementary sequence of such a sequence. In a particular embodiment, the nucleic acid probe is a portion of the nucleotide sequence of any one of LD block C03, LD block C04, LD block C06, LD block C07, LD block C10, LD block C12 and LD block C14, as described herein, optionally comprising at least one allele of a marker described herein, or at least one allele of one polymorphic marker or haplotype comprising at least one polymorphic marker described herein, or the probe can be the complementary sequence of such a sequence. Other suitable probes for use in the diagnostic assays of the invention are described herein. Hybridization can be performed by methods well known to the person skilled in the art (see, e.g., Current Protocols in Molecular Biology, Ausubel, F. et al., eds., John Wiley & Sons, including all supplements). In one embodiment, hybridization refers to specific hybridization, i.e., hybridization with no mismatches (exact hybridization). In one embodiment, the hybridization conditions for specific hybridization are high stringency.

[0222] Specific hybridization, if present, is detected using standard methods. If specific hybridization occurs between the nucleic acid probe and the nucleic acid in the test sample, then the sample contains the allele that is complementary to the nucleotide that is present in the nucleic acid probe. The process can be repeated for any markers of the present invention, or markers that make up a haplotype, or multiple probes can be used concurrently to detect more than one marker alleles at a time. It is also possible to design a single probe containing more than one marker alleles of a particular haplotype (e.g., a probe containing alleles complementary to 2, 3, 4, 5 or all of the markers that make up a particular haplotype). Detection of the particular markers of the haplotype in the sample is indicative that the source of the sample has the particular haplotype.

[0223] In one preferred embodiment, a method utilizing a detection oligonucleotide probe comprising a fluorescent moiety or group at its 3′ terminus and a quencher at its 5′ terminus, and an enhancer oligonucleotide, is employed, as described by Kutyavin et al. (Nucleic Acid Res. 34:e128 (2006)). The fluorescent moiety can be Gig Harbor Green or Yakima Yellow, or other suitable fluorescent moieties. The detection probe is designed to hybridize to a short nucleotide sequence that includes the SNP polymorphism to be detected. Preferably, the SNP is anywhere from the terminal residue to −6 residues from the 3′ end of the detection probe. The enhancer is a short oligonucleotide probe which hybridizes to the DNA template 3′ relative to the detection probe. The probes are designed such that a single nucleotide gap exists between the detection probe and the enhancer nucleotide probe when both are bound to the template. The gap creates a synthetic abasic site that is recognized by an endonuclease, such as Endonuclease IV. The enzyme cleaves the dye off the fully complementary detection probe, but cannot cleave a detection probe containing a mismatch. Thus, by measuring the fluorescence of the released fluorescent moiety, assessment of the presence of a particular allele defined by nucleotide sequence of the detection probe can be performed.

[0224] The detection probe can be of any suitable size, although preferably the probe is relatively short. In one embodiment, the probe is from 5-100 nucleotides in length. In another embodiment, the probe is from 10-50 nucleotides in length, and in another embodiment, the probe is from 12-30 nucleotides in length. Other lengths of the probe are possible and within scope of the skill of the average person skilled in the art.

[0225] In a preferred embodiment, the DNA template containing the SNP polymorphism is amplified by Polymerase Chain Reaction (PCR) prior to detection. In such an embodiment, the amplified DNA serves as the template for the detection probe and the enhancer probe.

[0226] Certain embodiments of the detection probe, the enhancer probe, and/or the primers used for amplification of the template by PCR include the use of modified bases, including modified A and modified G. The use of modified bases can be useful for adjusting the melting temperature of the nucleotide molecule (probe and/or primer) to the template DNA, for example for increasing the melting temperature in regions containing a low percentage of G or C bases, in which modified A with the capability of forming three hydrogen bonds to its complementary T can be used, or for decreasing the melting temperature in regions containing a high percentage of G or C bases, for example by using modified G bases that form only two hydrogen bonds to their complementary C base in a double stranded DNA molecule. In a preferred embodiment, modified bases are used in the design of the detection nucleotide probe. Any modified base known to the skilled person can be selected in these methods, and the selection of suitable bases is well within the scope of the skilled person based on the teachings herein and known bases available from commercial sources as known to the skilled person.

[0227] Alternatively, a peptide nucleic acid (PNA) probe can be used in addition to, or instead of, a nucleic acid probe in the hybridization methods described herein. A PNA is a DNA mimic having a peptide-like, inorganic backbone, such as N-(2-aminoethyl)glycine units, with an organic base (A, G, C, T or U) attached to the glycine nitrogen via a methylene carbonyl linker (see, for example, Nielsen, P., et al., Bioconjug. Chem. 5:3-7 (1994)). The PNA probe can be designed to specifically hybridize to a molecule in a sample suspected of containing one or more of the marker alleles or haplotypes that are associated with a particular vascular condition as described herein.

[0228] In one embodiment of the invention, a test sample containing genomic DNA obtained from the subject is collected and the polymerase chain reaction (PCR) is used to amplify a fragment comprising one or more markers or haplotypes of the present invention. As described herein, identification of a particular marker allele or haplotype can be accomplished using a variety of methods (e.g., sequence analysis, analysis by restriction digestion, specific hybridization, single stranded conformation polymorphism assays (SSCP), electrophoretic analysis, etc.). In another embodiment, diagnosis is accomplished by expression analysis, for example by using quantitative PCR (kinetic thermal cycling). This technique can, for example, utilize commercially available technologies, such as TaqMan® (Applied Biosystems, Foster City, Calif.). The technique can assess the presence of an alteration in the expression or composition of a polypeptide or splicing variant(s). Further, the expression of the variant(s) can be quantified as physically or functionally different.

[0229] In another embodiment of the methods of the invention, analysis by restriction digestion can be used to detect a particular allele if the allele results in the creation or elimination of a restriction site relative to a reference sequence. Restriction fragment length polymorphism (RFLP) analysis can be conducted, e.g., as described in Current Protocols in Molecular Biology, supra. The digestion pattern of the relevant DNA fragment indicates the presence or absence of the particular allele in the sample.

[0230] Sequence analysis can also be used to detect specific alleles or haplotypes. Therefore, in one embodiment, determination of the presence or absence of a particular marker alleles or haplotypes comprises sequence analysis of a test sample of DNA or RNA obtained from a subject or individual. PCR or other appropriate methods can be used to amplify a portion of a nucleic acid that contains a polymorphic marker or haplotype, and the presence of specific alleles can then be detected directly by sequencing the polymorphic site (or multiple polymorphic sites in a haplotype) of the genomic DNA in the sample.

[0231] In another embodiment, arrays of oligonucleotide probes that are complementary to target nucleic acid sequence segments from a subject, can be used to identify particular alleles at polymorphic sites. For example, an oligonucleotide array can be used. Oligonucleotide arrays typically comprise a plurality of different oligonucleotide probes that are coupled to a surface of a substrate in different known locations. These arrays can generally be produced using mechanical synthesis methods or light directed synthesis methods that incorporate a combination of photolithographic methods and solid phase oligonucleotide synthesis methods, or by other methods known to the person skilled in the art (see, e.g., Bier, F. F., et al. Adv Biochem Eng Biotechnol 109:433-53 (2008); Hoheisel, J. D., Nat Rev Genet. 7:200-10 (2006); Fan, J. B., et al. Methods Enzymol 410:57-73 (2006); Raqoussis, J. & Elvidge, G., Expert Rev Mol Diagn 6:145-52 (2006); Mockler, T. C., et al Genomics 85:1-15 (2005), and references cited therein, the entire teachings of each of which are incorporated by reference herein). Many additional descriptions of the preparation and use of oligonucleotide arrays for detection of polymorphisms can be found, for example, in U.S. Pat. No. 6,858,394, U.S. Pat. No. 6,429,027, U.S. Pat. No. 5,445,934, U.S. Pat. No. 5,700,637, U.S. Pat. No. 5,744,305, U.S. Pat. No. 5,945,334, U.S. Pat. No. 6,054,270, U.S. Pat. No. 6,300,063, U.S. Pat. No. 6,733,977, U.S. Pat. No. 7,364,858, EP 619 321, and EP 373 203, the entire teachings of which are incorporated by reference herein.

[0232] Other methods of nucleic acid analysis that are available to those skilled in the art can be used to detect a particular allele at a polymorphic site. Representative methods include, for example, direct manual sequencing (Church and Gilbert, Proc. Natl. Acad. Sci. USA, 81: 1991-1995 (1988); Sanger, F., et al., Proc. Natl. Acad. Sci. USA, 74:5463-5467 (1977); Beavis, et al., U.S. Pat. No. 5,288,644); automated fluorescent sequencing; single-stranded conformation polymorphism assays (SSCP); clamped denaturing gel electrophoresis (CDGE); denaturing gradient gel electrophoresis (DGGE) (Sheffield, V., et al., Proc. Natl. Acad. Sci. USA, 86:232-236 (1989)), mobility shift analysis (Orita, M., et al., Proc. Natl. Acad. Sci. USA, 86:2766-2770 (1989)), restriction enzyme analysis (Flavell, R., et al., Cell, 15:25-41 (1978); Geever, R., et al., Proc. Natl. Acad. Sci. USA, 78:5081-5085 (1981)); heteroduplex analysis; chemical mismatch cleavage (CMC) (Cotton, R., et al., Proc. Natl. Acad. Sci. USA, 85:4397-4401 (1985)); RNase protection assays (Myers, R., et al., Science, 230:1242-1246 (1985); use of polypeptides that recognize nucleotide mismatches, such as E. coli mutS protein; and allele-specific PCR.

[0233] In another embodiment of the invention, determination of a susceptibility to a condition can be made by examining expression and/or composition of a polypeptide encoded by a nucleic acid associated with the condition, in those instances where the genetic marker(s) or haplotype(s) of the present invention result in a change in the composition or expression of the polypeptide. Thus, determination of a susceptibility to the condition can be made by examining expression and/or composition such polypeptides. The markers described herein that show association to vascular conditions may also affect expression of nearby genes (e.g., any one of the TBX5, SCN10A, CAV1, ARHGAP24, CDKN1A and MYH genes). It is well known that regulatory element affecting gene expression may be located far away, even as far as tenths or hundreds of kilobases away, from the promoter region of a gene. By assaying for the presence or absence of at least one allele of at least one polymorphic marker of the present invention, it is thus possible to assess the expression level of such nearby genes. Possible mechanisms affecting these genes include, e.g., effects on transcription, effects on RNA splicing, alterations in relative amounts of alternative splice forms of mRNA, effects on RNA stability, effects on transport from the nucleus to cytoplasm, and effects on the efficiency and accuracy of translation.

[0234] A variety of methods can be used for detecting protein expression levels, including enzyme linked immunosorbent assays (ELISA), Western blots, immunoprecipitations and immunofluorescence. A test sample from a subject is assessed for the presence of an alteration in the expression and/or an alteration in composition of the polypeptide encoded by a particular nucleic acid. An alteration in expression of a polypeptide encoded by the nucleic acid can be, for example, an alteration in the quantitative polypeptide expression (i.e., the amount of polypeptide produced). An alteration in the composition of a polypeptide encoded by the nucleic acid is an alteration in the qualitative polypeptide expression (e.g., expression of a mutant polypeptide or of a different splicing variant). In one embodiment, determination of a susceptibility is made by detecting a particular splicing variant, or a particular pattern of splicing variants.

[0235] Both such alterations (quantitative and qualitative) can also be present. An “alteration” in the polypeptide expression or composition, as used herein, refers to an alteration in expression or composition in a test sample, as compared to the expression or composition of the polypeptide in a control sample. A control sample is a sample that corresponds to the test sample (e.g., is from the same type of cells), and is from a subject who is not affected by, and/or who does not have a susceptibility to, the particular condition. In one embodiment, the control sample is from a subject that does not possess a marker allele or haplotype associated with the condition, as described herein. Similarly, the presence of one or more different splicing variants in the test sample, or the presence of significantly different amounts of different splicing variants in the test sample, as compared with the control sample, can be indicative of a susceptibility to the condition. An alteration in the expression or composition of the polypeptide in the test sample, as compared with the control sample, can be indicative of a specific allele in the instance where the allele alters a splice site relative to the reference in the control sample. Various means of examining expression or composition of a polypeptide encoded by a nucleic acid are known to the person skilled in the art and can be used, including spectroscopy, colorimetry, electrophoresis, isoelectric focusing, and immunoassays (e.g., David et al., U.S. Pat. No. 4,376,110) such as immunoblotting (see, e.g., Current Protocols in Molecular Biology, particularly chapter 10, supra).

[0236] For example, in one embodiment, an antibody (e.g., an antibody with a detectable label) that is capable of binding to a polypeptide encoded by a nucleic acid associated with a vascular condition, as described herein, can be used. Antibodies can be polyclonal or monoclonal. An intact antibody, or a fragment thereof (e.g., Fv, Fab, Fab′, F(ab′)₂) can be used. The term “labeled”, with regard to the probe or antibody, is intended to encompass direct labeling of the probe or antibody by coupling (i.e., physically linking) a detectable substance to the probe or antibody, as well as indirect labeling of the probe or antibody by reactivity with another reagent that is directly labeled. Examples of indirect labeling include detection of a primary antibody using a labeled secondary antibody (e.g., a fluorescently-labeled secondary antibody) and end-labeling of a DNA probe with biotin such that it can be detected with fluorescently-labeled streptavidin.

[0237] In one embodiment of this method, the level or amount of a polypeptide in a test sample is compared with the level or amount of the polypeptide in a control sample. A level or amount of the polypeptide in the test sample that is higher or lower than the level or amount of the polypeptide in the control sample, such that the difference is statistically significant, is indicative of an alteration in the expression of the polypeptide encoded by the nucleic acid, and is diagnostic for a particular allele or haplotype responsible for causing the difference in expression. Alternatively, the composition of the polypeptide in a test sample is compared with the composition of the polypeptide in a control sample. In another embodiment, both the level or amount and the composition of the polypeptide can be assessed in the test sample and in the control sample.

[0238] In another embodiment, determination of a susceptibility is made by detecting at least one marker or haplotype of the present invention, in combination with an additional protein-based, RNA-based or DNA-based assay.

### Kits

[0239] Kits useful in the methods of the invention comprise components useful in any of the methods described herein, including for example, primers for nucleic acid amplification, hybridization probes, restriction enzymes (e.g., for RFLP analysis), allele-specific oligonucleotides, antibodies, means for amplification of nucleic acids, means for analyzing the nucleic acid sequence of a nucleic acids, means for analyzing the amino acid sequence of a polypeptide, etc. The kits can for example include necessary buffers, nucleic acid primers for amplifying nucleic acids, and reagents for allele-specific detection of the fragments amplified using such primers and necessary enzymes (e.g., DNA polymerase). Additionally, kits can provide reagents for assays to be used in combination with the methods of the present invention, e.g., reagents for use with other diagnostic assays.

[0240] In one embodiment, the invention pertains to a kit for assaying a sample from a subject to detect a susceptibility to a vascular condition selected from the group consisting of: an abnormal electrocardiogram measure, Atrial Fibrillation, Atrial Flutter, and Stroke in a subject, wherein the kit comprises reagents necessary for selectively detecting at least one allele of at least one polymorphism of the present invention in the genome of the individual. In a particular embodiment, the reagents comprise at least one contiguous oligonucleotide that hybridizes to a fragment of the genome of the individual comprising at least one polymorphism of the present invention. In another embodiment, the reagents comprise at least one pair of oligonucleotides that hybridize to opposite strands of a genomic segment obtained from a subject, wherein each oligonucleotide primer pair is designed to selectively amplify a fragment of the genome of the individual that includes at least one polymorphism associated with risk of the vascular condition. In embodiment, the polymorphism is selected from the group consisting of rs3825214, rs6795970, rs3807989, rs7660702, rs132311, rs1733724 and rs365990, and markers in linkage disequilibrium therewith. In yet another embodiment the fragment is at least 20 base pairs in size. Such oligonucleotides or nucleic acids (e.g., oligonucleotide primers) can be designed using portions of the nucleic acid sequence flanking polymorphisms (e.g., SNPs or microsatellites). In another embodiment, the kit comprises one or more labeled nucleic acids capable of allele-specific detection of one or more specific polymorphic markers or haplotypes, and reagents for detection of the label. Suitable labels include, e.g., a radioisotope, a fluorescent label, an enzyme label, an enzyme co-factor label, a magnetic label, a spin label, an epitope label.

[0241] In particular embodiments, the polymorphic marker or haplotype to be detected by the reagents of the kit comprises one or more markers, two or more markers, three or more markers, four or more markers or five or more markers selected from the group consisting of rs3825214, rs6795970, rs3807989, rs7660702, rs132311, rs1733724 and rs365990, and markers in linkage disequilibrium therewith. In another embodiment, the marker or haplotype to be detected comprises at least one marker from the group of markers in strong linkage disequilibrium, as defined by values of r² greater than 0.2, to at least one of the group of markers rs3825214, rs6795970, rs3807989, rs7660702, rs132311, rs1733724 and rs365990. In another embodiment, the marker or haplotype to be detected is selected from the group consisting of rs3825214, rs6795970, rs3807989, rs7660702, rs132311, rs1733724 and rs365990.

[0242] In a preferred embodiment, the DNA template containing the SNP polymorphism is amplified by Polymerase Chain Reaction (PCR) prior to detection, and primers for such amplification are included in the reagent kit. In such an embodiment, the amplified DNA serves as the template for the detection probe and the enhancer probe.

[0243] In one embodiment, the DNA template is amplified by means of Whole Genome Amplification (WGA) methods, prior to assessment for the presence of specific polymorphic markers as described herein. Standard methods well known to the skilled person for performing WGA may be utilized, and are within scope of the invention. In one such embodiment, reagents for performing WGA are included in the reagent kit.

[0244] In certain embodiments, determination of the presence of a particular marker allele or haplotype is indicative of a susceptibility (increased susceptibility or decreased susceptibility) to the vascular condition. In another embodiment, determination of the presence of the marker allele or haplotype is indicative of response to a therapeutic agent for the vascular condition. In another embodiment, the presence of the marker allele or haplotype is indicative of prognosis of the vascular condition. In yet another embodiment, the presence of the marker allele or haplotype is indicative of progress of treatment of the condition. Such treatment may include intervention by surgery, medication or by other means (e.g., lifestyle changes).

[0245] In a further aspect of the present invention, a pharmaceutical pack (kit) is provided, the pack comprising a therapeutic agent and a set of instructions for administration of the therapeutic agent to humans diagnostically tested for one or more variants of the present invention, as disclosed herein. The therapeutic agent can be a small molecule drug, an antibody, a peptide, an antisense or rnai molecule, or other therapeutic molecules. In one embodiment, an individual identified as a carrier of at least one variant of the present invention is instructed to take a prescribed dose of the therapeutic agent. In one such embodiment, an individual identified as a homozygous carrier of at least one variant of the present invention is instructed to take a prescribed dose of the therapeutic agent. In another embodiment, an individual identified as a non-carrier of at least one variant of the present invention is instructed to take a prescribed dose of the therapeutic agent.

[0246] In certain embodiments, the kit further comprises a set of instructions for using the reagents comprising the kit. In certain embodiments, the kit further comprises a collection of data comprising correlation data between the polymorphic markers assessed by the kit and susceptibility to prostate cancer and/or colorectal cancer.

### Therapeutic Agents

[0247] Treatment of Atrial Fibrillation and Atrial flutter is generally directed by two main objectives: (i) to prevent stroke and (ii) to treat symptoms.

### (i) Stroke Prevention

[0248] Anticoagulation is the therapy of choice for stroke prevention in atrial fibrillation and is indicated for the majority of patients with this arrhythmia. The only patients for whom anticoagulation is not strongly recommended are those younger than 65 years old who are considered low-risk, i.e., they have no organic heart disease, no hypertension, no previous history of stroke or transient ischemic attacks and no diabetes. This group as a whole has a lower risk of stroke and stroke prevention with aspirin is generally recommended. For all other patients, anticoagulation is indicated whether the atrial fibrillation is permanent, recurrent paroxysmal or recurrent persistent. It cannot be generalized how patients who present with their first episode of paroxysmal atrial fibrillation should be treated and the decision needs to be individualized for each patient. Anticoagulation is also indicated even when the patient with atrial fibrillation is felt to be maintained in sinus rhythm with antiarrhythmic therapy (rhythm controlled) since this type of therapy does not affect stroke risk.

[0249] Anticoagulants.

[0250] Anticoagulation is recommended in atrial fibrillation, as detailed above, for prevention of cardioembolism and stroke. The most widely studied oral anticoagulant is warfarin and this medication is universally recommended for chronic oral anticoagulation in atrial fibrillation. Warfarin has few side effects aside from the risk of bleeding but requires regular and careful monitoring of blood values during therapy (to measure the effect of the anticoagulation). The oral anticoagulant ximelagatran showed promise in stroke prevention in patients with atrial fibrillation and had the advantage of not requiring regular monitoring like warfarin. Ximelagatran was found however to cause unexplained liver injury and was withdrawn from the market in 2006. Several agents are available for intravenous and/or subcutaneous therapy, including heparin and the low molecular weight heparins (e.g. enoxaparin, dalteparin, tinzaparin, ardeparin, nadroparin and reviparin). These medications are recommended when rapid initiation of anticoagulation is necessary or if oral anticoagulation therapy has to be interrupted in high risk patients or for longer than one week in other patients for example due to a series of procedures. Other parenteral anticoagulants are available but not specifically recommended as therapy in atrial fibrillation; e.g., the factor Xa inhibitors fondaparinux and idraparinux, the thrombin-inhibitors lepirudin, bivalirudin and argatroban as well as danaparoid.

### (ii) Symptom Control.

[0251] Medical and surgical therapy applied to control symptoms of atrial fibrillation is tailored to the individual patient and consists of heart rate and/or rhythm control with medications, radiofrequency ablation and/or surgery.

[0252] Antiarrhythmic Medications.

[0253] In general terms, antiarrhythmic agents are used to suppress abnormal rhythms of the heart that are characteristic of cardiac arrhythmias, including atrial fibrillation and atrial flutter. One classification of antiarrhythmic agents is the Vaughan Williams classification, in which five main categories of antiarrhythmic agents are defined. Class I agents are fast sodium channel blockers and are subclassified based on kinetics and strenght of blockade as well as their effect on repolarization. Class Ia includes disopyramide, moricizine, procainamide and quinidine. Class Ib agents are lidocaine, mexiletine, tocamide, and phenyloin. Class Ic agents are encamide, flecamide, propafenone, ajmaline, cibenzoline and detajmium. Class II agents are beta blockers, they block the effects of catecholamines at beta-adrenergic receptors. Examples of beta blockers are esmolol, propranolol, metoprolol, alprenolol, atenolol, carvedilol, bisoprolol, acebutolol, nadolol, pindolol, labetalol, oxprenotol, penbutolol, timolol, betaxolol, cartelol, sotalol and levobunolol. Class III agents have mixed properties but are collectively potassium channel blockers and prolong repolarization. Medications in this category are amiodarone, azimilide, bretylium, dofetilide, tedisamil, ibutilide, sematilide, sotalol, N-acetyl procainamide, nifekalant hydrochloride, vernakalant and ambasilide. Class IV agents are calcium channel blockers and include verapamil, mibefradil and diltiazem. Finally, class V consists of miscellaneous antiarrhythmics and includes digoxin and adenosine.

[0254] Heart Rate Control,

[0255] Pharmacologic measures for maintenance of heart rate control include beta blockers, calcium channel blockers and digoxin. All these medications slow the electrical conduction through the atrioventricular node and slow the ventricular rate response to the rapid atrial fibrillation. Some antiarrhythmics used primarily for rhythm control (see below) also slow the atrioventricular node conduction rate and thus the ventricular heart rate response. These include some class III and Ic medications such as amiodarone, sotalol and flecamide.

[0256] Cardioversion.

[0257] Cardioversion of the heart rhythm from atrial fibrillation or atrial flutter to sinus rhythm can be achieved electrically, with synchronized direct-current cardioversion, or with medications such as ibutilide, amiodarone, procainamide, propafenone and flecamide.

### Heart Rhythm Control

[0258] Medications used for maintenance of sinus rhythm, i.e. rhythm control, include mainly antiarrhythmic medications from classes III, Ia and Ic. Examples are sotalol, amiodarone and dofetilide from class III, disopyramide, procainamide and quinidine from class Ia and flecinide and propafenone from class Ic. Treatment with these antiarrhythmic medications is complicated, can be hazardous, and should be directed by physicians specifically trained to use these medications. Many of the antiarrhythmics have serious side effects and should only be used in specific populations. For example, class Ic medications should not be used in patients with coronary artery disease and even if they can suppress atrial fibrillation, they can actually promote rapid ventricular response in atrial flutter. Class Ia medications can be used as last resort in patients without structural heart diseases. Sotalol (as most class III antiarrhythmics) can cause significant prolongation of the QT interval, specifically in patients with renal failure, and promote serious ventricular arrhythmias. Both sotalol and dofetilide as well as the Ia medications need to be initiated on an inpatient basis to monitore the QT interval. Although amiodarone is usually well tolerated and is widely used, amiodarone has many serious side effects with long-term therapy.

[0259] The variants (markers and/or haplotypes) disclosed herein can be useful in the identification of novel therapeutic targets for cardiac arrhythmia, in particular Atrial Fibrillation and Atrial Flutter. For example, genes containing, or in linkage disequilibrium with, one or more of these variants, or their products, as well as genes or their products that are directly or indirectly regulated by or interact with these variant genes or their products, can be targeted for the development of therapeutic agents. Therapeutic agents may comprise one or more of, for example, small non-protein and non-nucleic acid molecules, proteins, peptides, protein fragments, nucleic acids (DNA, RNA), PNA (peptide nucleic acids), or their derivatives or mimetics which can modulate the function and/or levels of the target genes or their gene products.

[0260] The nucleic acids and/or variants described herein, or nucleic acids comprising their complementary sequence, may be used as antisense constructs to control gene expression in cells, tissues or organs. The methodology associated with antisense techniques is well known to the skilled artisan, and is for example described and reviewed in AntisenseDrug Technology: Principles, Strategies, and Applications, Crooke, ed., Marcel Dekker Inc., New York (2001). In general, antisense agents (antisense oligonucleotides) are comprised of single stranded oligonucleotides (RNA or DNA) that are capable of binding to a complimentary nucleotide segment. By binding the appropriate target sequence, an RNA-RNA, DNA-DNA or RNA-DNA duplex is formed. The antisense oligonucleotides are complementary to the sense or coding strand of a gene. It is also possible to form a triple helix, where the antisense oligonucleotide binds to duplex DNA.

[0261] Several classes of antisense oligonucleotide are known to those skilled in the art, including cleavers and blockers. The former bind to target RNA sites, activate intracellular nucleases (e.g., RnaseH or Rnase L), that cleave the target RNA. Blockers bind to target RNA, inhibit protein translation by steric hindrance of the ribosomes. Examples of blockers include nucleic acids, morpholino compounds, locked nucleic acids and methylphosphonates (Thompson, Drug Discovery Today, 7:912-917 (2002)). Antisense oligonucleotides are useful directly as therapeutic agents, and are also useful for determining and validating gene function, for example by gene knock-out or gene knock-down experiments. Antisense technology is further described in Layery et al., Curr. Opin. Drug Discov. Devel. 6:561-569 (2003), Stephens et al., Curr. Opin. Mol. Ther. 5:118-122 (2003), Kurreck, Eur. J. Biochem. 270:1628-44 (2003), Dias et al., Mol. Cancer. Ter. 1:347-55 (2002), Chen, Methods Mol. Med. 75:621-636 (2003), Wang et al., Curr. Cancer Drug Targets 1:177-96 (2001), and Bennett, Antisense Nucleic Acid Drug.Dev. 12:215-24 (2002).

[0262] In certain embodiments, the antisense agent is an oligonucleotide that is capable of binding to a particular nucleotide segment. In certain embodiments, the nucleotide segment comprises the nucleotide sequence, or a fragment of the nucleotide sequence, of a gene selected from the group consisting of the human TBX5 gene, the human SCN10A gene, the human CAV1 gene, the human ARHGAP24 gene, the human CDKN1A gene, and the human MYH6 gene. In certain other embodiments, the antisense nucleotide is capable of binding to a nucleotide segment of as set forth in any one of SEQ ID NO:1-3623. Antisense nucleotides are suitably in the range of 5-400 nucleotides in length, including 5-200 nucleotides, 5-100 nucleotides, 10-50 nucleotides, and 10-30 nucleotides. In certain preferred embodiments, the antisense nucleotides is from 14-50 nucleotides in length, including 14-40 nucleotides and 14-30 nucleotides.

[0263] The variants described herein can also be used for the selection and design of antisense reagents that are specific for particular variants (e.g., any one of the variants disclosed herein, e.g., any one of the variants as set forth in SEQ ID NO:1-3623). Using information about the variants described herein, antisense oligonucleotides or other antisense molecules that specifically target mRNA molecules that contain one or more variants of the invention can be designed. In this manner, expression of mRNA molecules that contain one or more variant of the present invention (i.e. certain marker alleles and/or haplotypes) can be inhibited or blocked. In one embodiment, the antisense molecules are designed to specifically bind a particular allelic form (i.e., one or several variants (alleles and/or haplotypes)) of the target nucleic acid, thereby inhibiting translation of a product originating from this specific allele or haplotype, but which do not bind other or alternate variants at the specific polymorphic sites of the target nucleic acid molecule. As antisense molecules can be used to inactivate mRNA so as to inhibit gene expression, and thus protein expression, the molecules can be used for disease treatment. The methodology can involve cleavage by means of ribozymes containing nucleotide sequences complementary to one or more regions in the mRNA that attenuate the ability of the mRNA to be translated. Such mRNA regions include, for example, protein-coding regions, in particular protein-coding regions corresponding to catalytic activity, substrate and/or ligand binding sites, or other functional domains of a protein.

[0264] The phenomenon of RNA interference (RNAi) has been actively studied for the last decade, since its original discovery in C. elegans (Fire et al., Nature 391:806-11 (1998)), and in recent years its potential use in treatment of human disease has been actively pursued (reviewed in Kim & Rossi, Nature Rev. Genet. 8:173-204 (2007)). RNA interference (RNAi), also called gene silencing, is based on using double-stranded RNA molecules (dsRNA) to turn off specific genes. In the cell, cytoplasmic double-stranded RNA molecules (dsRNA) are processed by cellular complexes into small interfering RNA (siRNA). The siRNA guide the targeting of a protein-RNA complex to specific sites on a target mRNA, leading to cleavage of the mRNA (Thompson, Drug Discovery Today, 7:912-917 (2002)). The siRNA molecules are typically about 20, 21, 22 or 23 nucleotides in length. Thus, one aspect of the invention relates to isolated nucleic acid molecules, and the use of those molecules for RNA interference, i.e. as small interfering RNA molecules (siRNA). In one embodiment, the isolated nucleic acid molecules are 18-26 nucleotides in length, preferably 19-25 nucleotides in length, more preferably 20-24 nucleotides in length, and more preferably 21, 22 or 23 nucleotides in length.

[0265] Another pathway for RNAi-mediated gene silencing originates in endogenously encoded primary microRNA (pri-miRNA) transcripts, which are processed in the cell to generate precursor miRNA (pre-miRNA). These miRNA molecules are exported from the nucleus to the cytoplasm, where they undergo processing to generate mature miRNA molecules (miRNA), which direct translational inhibition by recognizing target sites in the 3′ untranslated regions of mRNAs, and subsequent mRNA degradation by processing P-bodies (reviewed in Kim & Rossi, Nature Rev. Genet. 8:173-204 (2007)).

[0266] Clinical applications of RNAi include the incorporation of synthetic siRNA duplexes, which preferably are approximately 20-23 nucleotides in size, and preferably have 3′ overlaps of 2 nucleotides. Knockdown of gene expression is established by sequence-specific design for the target mRNA. Several commercial sites for optimal design and synthesis of such molecules are known to those skilled in the art.

[0267] Other applications provide longer siRNA molecules (typically 25-30 nucleotides in length, preferably about 27 nucleotides), as well as small hairpin RNAs (shRNAs; typically about 29 nucleotides in length). The latter are naturally expressed, as described in Amarzguioui et al. (FEBS Lett. 579:5974-81 (2005)). Chemically synthetic siRNAs and shRNAs are substrates for in vivo processing, and in some cases provide more potent gene-silencing than shorter designs (Kim et al., Nature Biotechnol. 23:222-226 (2005); Siolas et al., Nature Biotechnol. 23:227-231 (2005)). In general siRNAs provide for transient silencing of gene expression, because their intracellular concentration is diluted by subsequent cell divisions. By contrast, expressed shRNAs mediate long-term, stable knockdown of target transcripts, for as long as transcription of the shRNA takes place (Marques et al., Nature Biotechnol. 23:559-565 (2006); Brummelkamp et al., Science 296: 550-553 (2002)).

[0268] Since RNAi molecules, including siRNA, miRNA and shRNA, act in a sequence-dependent manner, the variants presented herein can be used to design RNAi reagents that recognize specific nucleic acid molecules comprising specific alleles and/or haplotypes (e.g., the alleles and/or haplotypes of the present invention), while not recognizing nucleic acid molecules comprising other alleles or haplotypes. These RNAi reagents can thus recognize and destroy the target nucleic acid molecules. As with antisense reagents, RNAi reagents can be useful as therapeutic agents (i.e., for turning off disease-associated genes or disease-associated gene variants), but may also be useful for characterizing and validating gene function (e.g., by gene knock-out or gene knock-down experiments).

[0269] Delivery of RNAi may be performed by a range of methodologies known to those skilled in the art. Methods utilizing non-viral delivery include cholesterol, stable nucleic acid-lipid particle (SNALP), heavy-chain antibody fragment (Fab), aptamers and nanoparticles. Viral delivery methods include use of lentivirus, adenovirus and adeno-associated virus. The siRNA molecules are in some embodiments chemically modified to increase their stability. This can include modifications at the 2′ position of the ribose, including 2′-O-methylpurines and 2′-fluoropyrimidines, which provide resistance to Rnase activity. Other chemical modifications are possible and known to those skilled in the art.

[0270] The following references provide a further summary of RNAi, and possibilities for targeting specific genes using RNAi: Kim & Rossi, Nat. Rev. Genet. 8:173-184 (2007), Chen & Rajewsky, Nat. Rev. Genet. 8: 93-103 (2007), Reynolds, et al., Nat. Biotechnol. 22:326-330 (2004), Chi et al., Proc. Natl. Acad. Sci. USA 100:6343-6346 (2003), Vickers et al., J. Biol. Chem. 278:7108-7118 (2003), Agami, Curr. Opin. Chem. Biol. 6:829-834 (2002), Layery, et al., Curr. Opin. Drug Discov. Devel. 6:561-569 (2003), Shi, Trends Genet. 19:9-12 (2003), Shuey et al., Drug Discov. Today 7:1040-46 (2002), McManus et al., Nat. Rev. Genet. 3:737-747 (2002), Xia et al., Nat. Biotechnol. 20:1006-10 (2002), Plasterk et al., curr. Opin. Genet. Dev. 10:562-7 (2000), Bosher et al., Nat. Cell Biol. 2: E31-6 (2000), and Hunter, Curr. Biol. 9: R440-442 (1999).

[0271] A genetic defect leading to increased predisposition or risk for development of a disease, or a defect causing the disease, may be corrected permanently by administering to a subject carrying the defect a nucleic acid fragment that incorporates a repair sequence that supplies the normal/wild-type nucleotide(s) at the site of the genetic defect. Such site-specific repair sequence may concompass an RNA/DNA oligonucleotide that operates to promote endogenous repair of a subject's genomic DNA. The administration of the repair sequence may be performed by an appropriate vehicle, such as a complex with polyethelenimine, encapsulated in anionic liposomes, a viral vector such as an adenovirus vector, or other pharmaceutical compositions suitable for promoting intracellular uptake of the adminstered nucleic acid. The genetic defect may then be overcome, since the chimeric oligonucleotides induce the incorporation of the normal sequence into the genome of the subject, leading to expression of the normal/wild-type gene product. The replacement is propagated, thus rendering a permanent repair and alleviation of the symptoms associated with the disease or condition.

[0272] The present invention provides methods for identifying compounds or agents that can be used to treat a disease characterized by an abnormal ECG measure, including Atrial Fibrillation and Atrial Flutter, or Stroke. Thus, the variants of the invention are useful as targets for the identification and/or development of therapeutic agents. In certain embodiments, such methods include assaying the ability of an agent or compound to modulate the activity and/or expression of a nucleic acid that includes at least one of the variants (markers and/or haplotypes) of the present invention, or the encoded product of the nucleic acid (e.g., an encoded product of one or more of the human TBX5, SCN10A, CAV1, ARHGAP24, CDKN1A and MYH6 genes). This in turn can be used to identify agents or compounds that inhibit or alter the undesired activity or expression of the encoded nucleic acid product. Assays for performing such experiments can be performed in cell-based systems or in cell-free systems, as known to the skilled person. Cell-based systems include cells naturally expressing the nucleic acid molecules of interest, or recombinant cells that have been genetically modified so as to express a certain desired nucleic acid molecule.

[0273] Variant gene expression in a patient can be assessed by expression of a variant-containing nucleic acid sequence (for example, a gene containing at least one variant of the present invention, which can be transcribed into RNA containing the at least one variant, and in turn translated into protein), or by altered expression of a normal/wild-type nucleic acid sequence due to variants affecting the level or pattern of expression of the normal transcripts, for example variants in the regulatory or control region of the gene. Assays for gene expression include direct nucleic acid assays (mRNA), assays for expressed protein levels, or assays of collateral compounds involved in a pathway, for example a signal pathway. Furthermore, the expression of genes that are up- or down-regulated in response to the signal pathway can also be assayed. One embodiment includes operably linking a reporter gene, such as luciferase, to the regulatory region of the gene(s) of interest.

[0274] Modulators of gene expression can in one embodiment be identified when a cell is contacted with a candidate compound or agent, and the expression of mRNA is determined. The expression level of mRNA in the presence of the candidate compound or agent is compared to the expression level in the absence of the compound or agent. Based on this comparison, candidate compounds or agents for treating the disease can be identified as those modulating the gene expression of the variant gene. When expression of mRNA or the encoded protein is statistically significantly greater in the presence of the candidate compound or agent than in its absence, then the candidate compound or agent is identified as a stimulator or up-regulator of expression of the nucleic acid. When nucleic acid expression or protein level is statistically significantly less in the presence of the candidate compound or agent than in its absence, then the candidate compound is identified as an inhibitor or down-regulator of the nucleic acid expression.

[0275] The invention further provides methods of treatment using a compound identified through drug (compound and/or agent) screening as a gene modulator (i.e. stimulator and/or inhibitor of gene expression).

### Methods of Assessing Probability of Response to Therapeutic Agents, Methods of Monitoring Progress of Treatment and Methods of Treatment

[0276] As is known in the art, individuals can have differential responses to a particular therapy (e.g., a therapeutic agent or therapeutic method). Pharmacogenomics addresses the issue of how genetic variations (e.g., the variants (markers and/or haplotypes) of the present invention) affect drug response, due to altered drug disposition and/or abnormal or altered action of the drug. Thus, the basis of the differential response may be genetically determined in part. Clinical outcomes due to genetic variations affecting drug response may result in toxicity of the drug in certain individuals (e.g., carriers or non-carriers of the genetic variants of the present invention), or therapeutic failure of the drug. Therefore, the variants of the present invention may determine the manner in which a therapeutic agent and/or method acts on the body, or the way in which the body metabolizes the therapeutic agent.

[0277] Accordingly, in one embodiment, the presence of a particular allele at a polymorphic site is indicative of a different response, e.g. a different response rate, to a particular treatment modality. This means that a patient diagnosed with a disease, and carrying a certain allele at a polymorphic would respond better to, or worse to, a specific therapeutic, drug and/or other therapy used to treat the disease. Therefore, the presence or absence of the marker allele or haplotype could aid in deciding what treatment should be used for a the patient. For example, for a newly diagnosed patient, the presence of a marker or haplotype of the present invention may be assessed (e.g., through testing DNA derived from a blood sample, as described herein). If the patient is positive for a marker allele or haplotype (that is, at least one specific allele of the marker, or haplotype, is present), then the physician recommends one particular therapy, while if the patient is negative for the at least one allele of a marker, or a haplotype, then a different course of therapy may be recommended (which may include recommending that no immediate therapy, other than serial monitoring for progression of the disease, be performed). Thus, the patient's carrier status could be used to help determine whether a particular treatment modality should be administered. The value lies within the possibilities of being able to diagnose the disease at an early stage, to select the most appropriate treatment, and provide information to the clinician about prognosis/aggressiveness of the disease in order to be able to apply the most appropriate treatment.

[0278] Thus, one aspect of the invention relates to methods of assessing probability of response to a therapeutic agent for preventing, treating and/or ameliorating symptoms associated with a vascular condition selected from the group consisting of: an abnormal electrocardiogram measure, Atrial Fibrillation, Atrial Flutter, and Stroke, by determining whether certain variants found to correlate with risk of these conditions are present in the genome of the individual, as described in more detail herein. In one embodiment, the method comprises obtaining sequence data about a human individual identifying at least one allele of at least one polymorphic marker selected from the group consisting of rs3825214, rs6795970, rs3807989, rs7660702, rs132311, rs1733724 and rs365990, and markers in linkage disequilibrium therewith, wherein different alleles of the at least one polymorphic marker are associated with different probabilities of response to the therapeutic agent in humans, and determining the probability of a positive response to the therapeutic agent from the sequence data. The therapeutic agent may be any therapeutic agent that is useful for treating, or ameliorating symptoms of, any of the above mentioned conditions.

[0279] In one embodiment, the therapeutic agent is an agent for treating or controlling abnormal heart rate, and the polymorphic marker is selected from the group consisting of rs365990, and markers in linkage disequilibrium therewith. In another embodiment, the therapeutic agent is an agent for treating Atrial Fibrillation, and the polymorphic marker is selected from the group consisting of rs3825214 and rs3807989, and markers in linkage disequilibrium therewith.

[0280] The present invention also relates to methods of monitoring progress or effectiveness of a treatment for any of these conditions. This can be done based on the genotype and/or haplotype status of the markers and haplotypes of the present invention, i.e., by assessing the absence or presence of at least one allele of at least one polymorphic marker as disclosed herein, or by monitoring expression of genes that are associated with the variants (markers and haplotypes) of the present invention. The risk gene mrna or the encoded polypeptide can be measured in a tissue sample (e.g., a peripheral blood sample, or a biopsy sample). Expression levels and/or mrna levels can thus be determined before and during treatment to monitor its effectiveness. Alternatively, or concomitantly, the genotype and/or haplotype status of at least one risk variant for the condition as presented herein is determined before and during treatment to monitor its effectiveness.

[0281] Alternatively, biological networks or metabolic pathways related to the markers and haplotypes of the present invention can be monitored by determining mRNA and/or polypeptide levels. This can be done for example, by monitoring expression levels or polypeptides for several genes belonging to the network and/or pathway, in samples taken before and during treatment. Alternatively, metabolites belonging to the biological network or metabolic pathway can be determined before and during treatment. Effectiveness of the treatment is determined by comparing observed changes in expression levels/metabolite levels during treatment to corresponding data from healthy subjects.

[0282] In a further aspect, the markers of the present invention can be used to increase power and effectiveness of clinical trials. Thus, individuals who are carriers of at least one at-risk variant of the present invention may be more likely to respond favorably to a particular treatment modality. In one embodiment, individuals who carry at-risk variants for gene(s) in a pathway and/or metabolic network for which a particular treatment (e.g., small molecule drug) is targeting, are more likely to be responders to the treatment. In another embodiment, individuals who carry at-risk variants for a gene, which expression and/or function is altered by the at-risk variant, are more likely to be responders to a treatment modality targeting that gene, its expression or its gene product. This application can improve the safety of clinical trials, but can also enhance the chance that a clinical trial will demonstrate statistically significant efficacy, which may be limited to a certain sub-group of the population. Thus, one possible outcome of such a trial is that carriers of certain genetic variants are statistically significantly likely to show positive response to the therapeutic agent, i.e. experience alleviation of symptoms associated with the condition when taking the therapeutic agent or drug as prescribed.

[0283] In a further aspect, the markers and haplotypes of the present invention can be used for targeting the selection of pharmaceutical agents for specific individuals. Personalized selection of treatment modalities, lifestyle changes or combination of lifestyle changes and administration of particular treatment, can be realized by the utilization of the at-risk variants of the present invention. Thus, the knowledge of an individual's status for particular markers of the present invention, can be useful for selection of treatment options that target genes or gene products affected by the at-risk variants of the invention. Certain combinations of variants may be suitable for one selection of treatment options, while other gene variant combinations may target other treatment options. Such combination of variant may include one variant, two variants, three variants, or four or more variants, as needed to determine with clinically reliable accuracy the selection of treatment module.

[0284] One such aspect relates to the use of a therapeutic agent in the preparation of a medicament for treating a condition selected from the group consisting of: an abnormal electrocardiogram measure, Atrial Fibrillation, Atrial Flutter, and Stroke in a human individual that has been tested for the presence of at least one allele of at least one polymorphic marker selected from the group consisting of rs3825214, rs6795970, rs3807989, rs7660702, rs132311, rs1733724 and rs365990, and markers in linkage disequilibrium therewith. In one embodiment, determination of the presence of at least one at-risk allele of the at least one marker is indicative that the human individual is suitable for administration of the therapeutic agent. In certain embodiments, the risk allele is an allele that increases risk of an increased ECG interval and/or increased risk of Atrial Fibrillation, Atrial Flutter and/or Stroke. The therapeutic agent may be suitably selected from the therapeutic agents as described herein.

[0285] Another aspect relates to a method of treating a condition selected from the group consisting of: an abnormal electrocardiogram measure, Atrial Fibrillation, Atrial Flutter, and Stroke, the method comprising: (a) selecting a human individual that has been tested for the presence of at least one allele of at least one polymorphic marker selected from the group consisting of rs3825214, rs6795970, rs3807989, rs7660702, rs132311, rs1733724 and rs365990, and markers in linkage disequilibrium therewith; and (b) administering to the individual a therapeutically effective amount of the therapeutic agent.

### Computer-Implemented Aspects

[0286] As understood by those of ordinary skill in the art, the methods and information described herein may be implemented, in all or in part, as computer executable instructions on known computer readable media. For example, the methods described herein may be implemented in hardware. Alternatively, the method may be implemented in software stored in, for example, one or more memories or other computer readable medium and implemented on one or more processors. As is known, the processors may be associated with one or more controllers, calculation units and/or other units of a computer system, or implanted in firmware as desired. If implemented in software, the routines may be stored in any computer readable memory such as in RAM, ROM, flash memory, a magnetic disk, a laser disk, or other storage medium, as is also known. Likewise, this software may be delivered to a computing device via any known delivery method including, for example, over a communication channel such as a telephone line, the Internet, a wireless connection, etc., or via a transportable medium, such as a computer readable disk, flash drive, etc.

[0287] More generally, and as understood by those of ordinary skill in the art, the various steps described above may be implemented as various blocks, operations, tools, modules and techniques which, in turn, may be implemented in hardware, firmware, software, or any combination of hardware, firmware, and/or software. When implemented in hardware, some or all of the blocks, operations, techniques, etc. may be implemented in, for example, a custom integrated circuit (IC), an application specific integrated circuit (ASIC), a field programmable logic array (FPGA), a programmable logic array (PLA), etc.

[0288] When implemented in software, the software may be stored in any known computer readable medium such as on a magnetic disk, an optical disk, or other storage medium, in a RAM or ROM or flash memory of a computer, processor, hard disk drive, optical disk drive, tape drive, etc. Likewise, the software may be delivered to a user or a computing system via any known delivery method including, for example, on a computer readable disk or other transportable computer storage mechanism.

[0289] FIG. 1 illustrates an example of a suitable computing system environment 100 on which a system for the steps of the claimed method and apparatus may be implemented. The computing system environment 100 is only one example of a suitable computing environment and is not intended to suggest any limitation as to the scope of use or functionality of the method or apparatus of the claims. Neither should the computing environment 100 be interpreted as having any dependency or requirement relating to any one or combination of components illustrated in the exemplary operating environment 100.

[0290] The steps of the claimed method and system are operational with numerous other general purpose or special purpose computing system environments or configurations. Examples of well known computing systems, environments, and/or configurations that may be suitable for use with the methods or system of the claims include, but are not limited to, personal computers, server computers, hand-held or laptop devices, multiprocessor systems, microprocessor-based systems, set top boxes, programmable consumer electronics, network PCs, minicomputers, mainframe computers, distributed computing environments that include any of the above systems or devices, and the like.

[0291] The steps of the claimed method and system may be described in the general context of computer-executable instructions, such as program modules, being executed by a computer. Generally, program modules include routines, programs, objects, components, data structures, etc. that perform particular tasks or implement particular abstract data types. The methods and apparatus may also be practiced in distributed computing environments where tasks are performed by remote processing devices that are linked through a communications network. In both integrated and distributed computing environments, program modules may be located in both local and remote computer storage media including memory storage devices.

[0292] With reference to FIG. 1, an exemplary system for implementing the steps of the claimed method and system includes a general purpose computing device in the form of a computer 110. Components of computer 110 may include, but are not limited to, a processing unit 120, a system memory 130, and a system bus 121 that couples various system components including the system memory to the processing unit 120. The system bus 121 may be any of several types of bus structures including a memory bus or memory controller, a peripheral bus, and a local bus using any of a variety of bus architectures. By way of example, and not limitation, such architectures include Industry Standard Architecture (USA) bus, Micro Channel Architecture (MCA) bus, Enhanced ISA (EISA) bus, Video Electronics Standards Association (VESA) local bus, and Peripheral Component Interconnect (PCI) bus also known as Mezzanine bus.

[0293] Computer 110 typically includes a variety of computer readable media. Computer readable media can be any available media that can be accessed by computer 110 and includes both volatile and nonvolatile media, removable and non-removable media. By way of example, and not limitation, computer readable media may comprise computer storage media and communication media. Computer storage media includes both volatile and nonvolatile, removable and non-removable media implemented in any method or technology for storage of information such as computer readable instructions, data structures, program modules or other data. Computer storage media includes, but is not limited to, RAM, ROM, EEPROM, flash memory or other memory technology, CD-ROM, digital versatile disks (DVD) or other optical disk storage, magnetic cassettes, magnetic tape, magnetic disk storage or other magnetic storage devices, or any other medium which can be used to store the desired information and which can accessed by computer 110. Communication media typically embodies computer readable instructions, data structures, program modules or other data in a modulated data signal such as a carrier wave or other transport mechanism and includes any information delivery media. The term “modulated data signal” means a signal that has one or more of its characteristics set or changed in such a manner as to encode information in the signal. By way of example, and not limitation, communication media includes wired media such as a wired network or direct-wired connection, and wireless media such as acoustic, RF, infrared and other wireless media. Combinations of the any of the above should also be included within the scope of computer readable media.

[0294] The system memory 130 includes computer storage media in the form of volatile and/or nonvolatile memory such as read only memory (ROM) 131 and random access memory (RAM) 132. A basic input/output system 133 (BIOS), containing the basic routines that help to transfer information between elements within computer 110, such as during start-up, is typically stored in ROM 131. RAM 132 typically contains data and/or program modules that are immediately accessible to and/or presently being operated on by processing unit 120. By way of example, and not limitation, FIG. 1 illustrates operating system 134, application programs 135, other program modules 136, and program data 137.

[0295] The computer 110 may also include other removable/non-removable, volatile/nonvolatile computer storage media. By way of example only, FIG. 1 illustrates a hard disk drive 140 that reads from or writes to non-removable, nonvolatile magnetic media, a magnetic disk drive 151 that reads from or writes to a removable, nonvolatile magnetic disk 152, and an optical disk drive 155 that reads from or writes to a removable, nonvolatile optical disk 156 such as a CD ROM or other optical media. Other removable/non-removable, volatile/nonvolatile computer storage media that can be used in the exemplary operating environment include, but are not limited to, magnetic tape cassettes, flash memory cards, digital versatile disks, digital video tape, solid state RAM, solid state ROM, and the like. The hard disk drive 141 is typically connected to the system bus 121 through a non-removable memory interface such as interface 140, and magnetic disk drive 151 and optical disk drive 155 are typically connected to the system bus 121 by a removable memory interface, such as interface 150.

[0296] The drives and their associated computer storage media discussed above and illustrated in FIG. 1, provide storage of computer readable instructions, data structures, program modules and other data for the computer 110. In FIG. 1, for example, hard disk drive 141 is illustrated as storing operating system 144, application programs 145, other program modules 146, and program data 147. Note that these components can either be the same as or different from operating system 134, application programs 135, other program modules 136, and program data 137. Operating system 144, application programs 145, other program modules 146, and program data 147 are given different numbers here to illustrate that, at a minimum, they are different copies. A user may enter commands and information into the computer 20 through input devices such as a keyboard 162 and pointing device 161, commonly referred to as a mouse, trackball or touch pad. Other input devices (not shown) may include a microphone, joystick, game pad, satellite dish, scanner, or the like. These and other input devices are often connected to the processing unit 120 through a user input interface 160 that is coupled to the system bus, but may be connected by other interface and bus structures, such as a parallel port, game port or a universal serial bus (USB). A monitor 191 or other type of display device is also connected to the system bus 121 via an interface, such as a video interface 190. In addition to the monitor, computers may also include other peripheral output devices such as speakers 197 and printer 196, which may be connected through an output peripheral interface 190.

[0297] The computer 110 may operate in a networked environment using logical connections to one or more remote computers, such as a remote computer 180. The remote computer 180 may be a personal computer, a server, a router, a network PC, a peer device or other common network node, and typically includes many or all of the elements described above relative to the computer 110, although only a memory storage device 181 has been illustrated in FIG. 1. The logical connections depicted in FIG. 1 include a local area network (LAN) 171 and a wide area network (WAN) 173, but may also include other networks. Such networking environments are commonplace in offices, enterprise-wide computer networks, intranets and the Internet.

[0298] When used in a LAN networking environment, the computer 110 is connected to the LAN 171 through a network interface or adapter 170. When used in a WAN networking environment, the computer 110 typically includes a modem 172 or other means for establishing communications over the WAN 173, such as the Internet. The modem 172, which may be internal or external, may be connected to the system bus 121 via the user input interface 160, or other appropriate mechanism. In a networked environment, program modules depicted relative to the computer 110, or portions thereof, may be stored in the remote memory storage device. By way of example, and not limitation, FIG. 1 illustrates remote application programs 185 as residing on memory device 181. It will be appreciated that the network connections shown are exemplary and other means of establishing a communications link between the computers may be used.

[0299] Although the forgoing text sets forth a detailed description of numerous different embodiments of the invention, it should be understood that the scope of the invention is defined by the words of the claims set forth at the end of this patent. The detailed description is to be construed as exemplary only and does not describe every possibly embodiment of the invention because describing every possible embodiment would be impractical, if not impossible. Numerous alternative embodiments could be implemented, using either current technology or technology developed after the filing date of this patent, which would still fall within the scope of the claims defining the invention.

[0300] While the risk evaluation system and method, and other elements, have been described as preferably being implemented in software, they may be implemented in hardware, firmware, etc., and may be implemented by any other processor. Thus, the elements described herein may be implemented in a standard multi-purpose CPU or on specifically designed hardware or firmware such as an application-specific integrated circuit (ASIC) or other hard-wired device as desired, including, but not limited to, the computer 110 of FIG. 1. When implemented in software, the software routine may be stored in any computer readable memory such as on a magnetic disk, a laser disk, or other storage medium, in a RAM or ROM of a computer or processor, in any database, etc. Likewise, this software may be delivered to a user or a diagnostic system via any known or desired delivery method including, for example, on a computer readable disk or other transportable computer storage mechanism or over a communication channel such as a telephone line, the internet, wireless communication, etc. (which are viewed as being the same as or interchangeable with providing such software via a transportable storage medium).

[0301] Thus, many modifications and variations may be made in the techniques and structures described and illustrated herein without departing from the spirit and scope of the present invention. Thus, it should be understood that the methods and apparatus described herein are illustrative only and are not limiting upon the scope of the invention.

[0302] Accordingly, the invention relates to computer-implemented applications using the polymorphic markers described herein, and genotype and/or disease-association data derived therefrom. Such applications can be useful for storing, manipulating or otherwise analyzing genotype data that is useful in the methods of the invention. One example pertains to storing genotype information derived from an individual on readable media, so as to be able to provide the genotype information to a third party (e.g., the individual, a guardian of the individual, a health care provider or genetic analysis service provider), or for deriving information from the genotype data, e.g., by comparing the genotype data to information about genetic risk factors contributing to increased susceptibility to the disease, and reporting results based on such comparison.

[0303] In general terms, computer-readable media has capabilities of storing (i) identifier information for at least one polymorphic marker or a haplotype, as described herein; (ii) an indicator of the frequency of at least one allele of said at least one marker, or the frequency of a haplotype, in individuals with the disease; and an indicator of the frequency of at least one allele of said at least one marker, or the frequency of a haplotype, in a reference population. The reference population can be a disease-free population of individuals. Alternatively, the reference population is a random sample from the general population, and is thus representative of the population at large. The frequency indicator may be a calculated frequency, a count of alleles and/or haplotype copies, or normalized or otherwise manipulated values of the actual frequencies that are suitable for the particular medium.

[0304] The markers and haplotypes described herein are in certain embodiments useful for interpretation and/or analysis of genotype data. Thus in certain embodiments, determination of the presence of an at-risk allele for a vascular condition, as described herein, or determination of the presence of an allele at a polymorphic marker in LD with any such risk allele, is indicative of the individual from whom the genotype data originates is at increased risk of the condition. In one such embodiment, genotype data is generated for at least one polymorphic marker shown herein to be associated with risk of the condition, or a marker in linkage disequilibrium therewith. The genotype data is subsequently made available to a third party, such as the individual from whom the data originates, his/her guardian or representative, a physician or health care worker, genetic counsellor, or insurance agent, for example via a user interface accessible over the internet, together with an interpretation of the genotype data, e.g., in the form of a risk measure (such as an absolute risk (AR), risk ratio (RR) or odds ratio (OR)) for the disease. In another embodiment, at-risk markers identified in a genotype dataset derived from an individual are assessed and results from the assessment of the risk conferred by the presence of such at-risk variants in the dataset are made available to the third party, for example via a secure web interface, or by other communication means. The results of such risk assessment can be reported in numeric form (e.g., by risk values, such as absolute risk, relative risk, and/or an odds ratio, or by a percentage increase in risk compared with a reference), by graphical means, or by other means suitable to illustrate the risk to the individual from whom the genotype data is derived.

[0305] One computer-implemented aspect relates to a system for generating a risk assessment report for a vascular condition (e.g., an abnormal electrocardiogram measure, Atrial Fibrillation, Atrial Flutter, and/or Stroke). The system suitably comprises (a) a memory configured to store sequence data for at least one human subject, the sequence data identifying at least one allele of at least one polymorphic marker, wherein different alleles of the marker are associated with different susceptibilities to the condition in humans; and (b) a processor configured to (i) receive information identifying the at least one allele of the at least one polymorphic marker; (ii) transform said information into a risk measure of the condition for the human subject; (iii) generate a risk assessment report based on the received information; and (iv) provide the risk assessment report on an output device. The sequence data may be a dataset for particular polymorphic markers. The sequence data may also be continuous sequence data from the subject, such as complete genomic sequence data from the individual. The identification of particular alleles at particular polymorphic sites (markers) can be used for determining risk, be transforming the allelic data (genotype data) into a suitable risk measure. The risk measure can be any convenient risk measure, as is described in more detail in the foregoing, including for example a lifetime risk measure (e.g., a percentage absolute risk, a relative risk value compared with an average person from the population, a relative risk value compared with individuals who do not carry the particular at-risk variant, etc.).

### Nucleic Acids and Polypeptides

[0306] The nucleic acids and polypeptides described herein can be used in methods and kits of the present invention. An “isolated” nucleic acid molecule, as used herein, is one that is separated from nucleic acids that normally flank the gene or nucleotide sequence (as in genomic sequences) and/or has been completely or partially purified from other transcribed sequences (e.g., as in an RNA library). For example, an isolated nucleic acid of the invention can be substantially isolated with respect to the complex cellular milieu in which it naturally occurs, or culture medium when produced by recombinant techniques, or chemical precursors or other chemicals when chemically synthesized. In some instances, the isolated material will form part of a composition (for example, a crude extract containing other substances), buffer system or reagent mix. In other circumstances, the material can be purified to essential homogeneity, for example as determined by polyacrylamide gel electrophoresis (PAGE) or column chromatography (e.g., HPLC). An isolated nucleic acid molecule of the invention can comprise at least about 50%, at least about 80% or at least about 90% (on a molar basis) of all macromolecular species present. With regard to genomic DNA, the term “isolated” also can refer to nucleic acid molecules that are separated from the chromosome with which the genomic DNA is naturally associated. For example, the isolated nucleic acid molecule can contain less than about 250 kb, 200 kb, 150 kb, 100 kb, 75 kb, 50 kb, 25 kb, 10 kb, 5 kb, 4 kb, 3 kb, 2 kb, 1 kb, 0.5 kb or 0.1 kb of the nucleotides that flank the nucleic acid molecule in the genomic DNA of the cell from which the nucleic acid molecule is derived.

[0307] The nucleic acid molecule can be fused to other coding or regulatory sequences and still be considered isolated. Thus, recombinant DNA contained in a vector is included in the definition of “isolated” as used herein. Also, isolated nucleic acid molecules include recombinant DNA molecules in heterologous host cells or heterologous organisms, as well as partially or substantially purified DNA molecules in solution. “Isolated” nucleic acid molecules also encompass in vivo and in vitro RNA transcripts of the DNA molecules of the present invention. An isolated nucleic acid molecule or nucleotide sequence can include a nucleic acid molecule or nucleotide sequence that is synthesized chemically or by recombinant means. Such isolated nucleotide sequences are useful, for example, in the manufacture of the encoded polypeptide, as probes for isolating homologous sequences (e.g., from other mammalian species), for gene mapping (e.g., by in situ hybridization with chromosomes), or for detecting expression of the gene in tissue (e.g., human tissue), such as by Northern blot analysis or other hybridization techniques.

[0308] The invention also pertains to nucleic acid molecules that hybridize under high stringency hybridization conditions, such as for selective hybridization, to a nucleotide sequence described herein (e.g., nucleic acid molecules that specifically hybridize to a nucleotide sequence containing a polymorphic site associated with a marker or haplotype described herein). Such nucleic acid molecules can be detected and/or isolated by allele- or sequence-specific hybridization (e.g., under high stringency conditions). Stringency conditions and methods for nucleic acid hybridizations are well known to the skilled person (see, e.g., Current Protocols in Molecular Biology, Ausubel, F. et al, John Wiley & Sons, (1998), and Kraus, M. and Aaronson, S., Methods Enzymol., 200:546-556 (1991), the entire teachings of which are incorporated by reference herein.

[0309] The percent identity of two nucleotide or amino acid sequences can be determined by aligning the sequences for optimal comparison purposes (e.g., gaps can be introduced in the sequence of a first sequence). The nucleotides or amino acids at corresponding positions are then compared, and the percent identity between the two sequences is a function of the number of identical positions shared by the sequences (i.e., % identity=# of identical positions/total # of positions×100). In certain embodiments, the length of a sequence aligned for comparison purposes is at least 30%, at least 40%, at least 50%, at least 60%, at least 70%, at least 80%, at least 90%, or at least 95%, of the length of the reference sequence. The actual comparison of the two sequences can be accomplished by well-known methods, for example, using a mathematical algorithm. A non-limiting example of such a mathematical algorithm is described in Karlin, S, and Altschul, S., Proc. Natl. Acad. Sci. USA, 90:5873-5877 (1993). Such an algorithm is incorporated into the NBLAST and XBLAST programs (version 2.0), as described in Altschul, S. et al., Nucleic Acids Res., 25:3389-3402 (1997). Another example of an algorithm is BLAT (Kent, W. J. Genome Res. 12:656-64 (2002)). Other examples include the algorithm of Myers and Miller, CABIOS (1989), ADVANCE and ADAM as described in Torellis, A. and Robotti, C., Comput. Appl. Biosci. 10:3-5 (1994); and FASTA described in Pearson, W. and Lipman, D., Proc. Natl. Acad. Sci. USA, 85:2444-48 (1988). In another embodiment, the percent identity between two amino acid sequences can be accomplished using the GAP program in the GCG software package (Accelrys, Cambridge, UK).

[0310] The present invention also provides isolated nucleic acid molecules that contain a fragment or portion that hybridizes under highly stringent conditions to a nucleic acid that comprises, or consists of, the nucleotide sequence of LD Block C03, LD Block CO₄, LD Block C06, LD Block C07, LD Block C10, LD Block C12 or LD Block C14, or a nucleotide sequence comprising, or consisting of, the complement of the nucleotide sequence of LD Block C03, LD Block C04, LD Block C06, LD Block C07, LD Block C10, LD Block C12 or LD Block C14, wherein the nucleotide sequence comprises at least one polymorphic marker as described herein. The nucleic acid fragments of the invention may suitably be at least about 15, at least about 18, 20, 23 or 25 nucleotides, and can be 30, 40, 50, 100, 200, 500, 1000, 10,000 or more nucleotides in length. In certain embodiments, the nucleotides are less than 1000, less than 500, less than 400, less than 300, less than 200, less than 100, or less than 50 nucleotides in length.

[0311] The nucleic acid fragments of the invention are used as probes or primers in assays such as those described herein. “Probes” or “primers” are oligonucleotides that hybridize in a base-specific manner to a complementary strand of a nucleic acid molecule. In addition to DNA and RNA, such probes and primers include polypeptide nucleic acids (PNA), as described in Nielsen, P. et al., Science 254:1497-1500 (1991). A probe or primer comprises a region of nucleotide sequence that hybridizes to at least about 15, typically about 20-25, and in certain embodiments about 40, 50 or 75, consecutive nucleotides of a nucleic acid molecule. In one embodiment, the probe or primer comprises at least one allele of at least one polymorphic marker or at least one haplotype described herein, or the complement thereof. In particular embodiments, a probe or primer can comprise 100 or fewer nucleotides; for example, in certain embodiments from 6 to 50 nucleotides, or, for example, from 12 to 30 nucleotides. In other embodiments, the probe or primer is at least 70% identical, at least 80% identical, at least 85% identical, at least 90% identical, or at least 95% identical, to the contiguous nucleotide sequence or to the complement of the contiguous nucleotide sequence. In another embodiment, the probe or primer is capable of selectively hybridizing to the contiguous nucleotide sequence or to the complement of the contiguous nucleotide sequence. Often, the probe or primer further comprises a label, e.g., a radioisotope, a fluorescent label, an enzyme label, an enzyme co-factor label, a magnetic label, a spin label, an epitope label.

[0312] The nucleic acid molecules of the invention, such as those described above, can be identified and isolated using standard molecular biology techniques well known to the skilled person. The amplified DNA can be labeled (e.g., radiolabeled, fluorescently labeled) and used as a probe for screening a cDNA library derived from human cells. The cDNA can be derived from mRNA and contained in a suitable vector. Corresponding clones can be isolated, DNA obtained following in vivo excision, and the cloned insert can be sequenced in either or both orientations by art-recognized methods to identify the correct reading frame encoding a polypeptide of the appropriate molecular weight. Using these or similar methods, the polypeptide and the DNA encoding the polypeptide can be isolated, sequenced and further characterized.

### Antibodies

[0313] The invention also provides antibodies which bind to an epitope comprising either a variant amino acid sequence (e.g., comprising an amino acid substitution) encoded by a variant allele or the reference amino acid sequence encoded by the corresponding non-variant or wild-type allele. The term “antibody” as used herein refers to immunoglobulin molecules and immunologically active portions of immunoglobulin molecules, i.e., molecules that contain antigen-binding sites that specifically bind an antigen. A molecule that specifically binds to a polypeptide of the invention is a molecule that binds to that polypeptide or a fragment thereof, but does not substantially bind other molecules in a sample, e.g., a biological sample, which naturally contains the polypeptide. Examples of immunologically active portions of immunoglobulin molecules include F(ab) and F(ab′)₂ fragments which can be generated by treating the antibody with an enzyme such as pepsin. The invention provides polyclonal and monoclonal antibodies that bind to a polypeptide of the invention. The term “monoclonal antibody” or “monoclonal antibody composition”, as used herein, refers to a population of antibody molecules that contain only one species of an antigen binding site capable of immunoreacting with a particular epitope of a polypeptide of the invention. A monoclonal antibody composition thus typically displays a single binding affinity for a particular polypeptide of the invention with which it immunoreacts.

[0314] Polyclonal antibodies can be prepared as described above by immunizing a suitable subject with a desired immunogen, e.g., polypeptide of the invention or a fragment thereof. The antibody titer in the immunized subject can be monitored over time by standard techniques, such as with an enzyme linked immunosorbent assay (ELISA) using immobilized polypeptide. If desired, the antibody molecules directed against the polypeptide can be isolated from the mammal (e.g., from the blood) and further purified by well-known techniques, such as protein A chromatography to obtain the IgG fraction. At an appropriate time after immunization, e.g., when the antibody titers are highest, antibody-producing cells can be obtained from the subject and used to prepare monoclonal antibodies by standard techniques, such as the hybridoma technique originally described by Kohler and Milstein, Nature 256:495-497 (1975), the human B cell hybridoma technique (Kozbor et al., Immunol. Today 4: 72 (1983)), the EBV-hybridoma technique (Cole et al., Monoclonal Antibodies and Cancer Therapy, Alan R. Liss, 1985, Inc., pp. 77-96) or trioma techniques. The technology for producing hybridomas is well known (see generally Current Protocols in Immunology (1994) Coligan et al., (eds.) John Wiley & Sons, Inc., New York, N.Y.). Briefly, an immortal cell line (typically a myeloma) is fused to lymphocytes (typically splenocytes) from a mammal immunized with an immunogen as described above, and the culture supernatants of the resulting hybridoma cells are screened to identify a hybridoma producing a monoclonal antibody that binds a polypeptide of the invention.

[0315] Any of the many well known protocols used for fusing lymphocytes and immortalized cell lines can be applied for the purpose of generating a monoclonal antibody to a polypeptide of the invention (see, e.g., Current Protocols in Immunology, supra; Galfre et al., Nature 266:55052 (1977); R. H. Kenneth, in Monoclonal Antibodies: A New Dimension In Biological Analyses, Plenum Publishing Corp., New York, N.Y. (1980); and Lerner, Yale J. Biol. Med. 54:387-402 (1981)). Moreover, the ordinarily skilled worker will appreciate that there are many variations of such methods that also would be useful.

[0316] Alternative to preparing monoclonal antibody-secreting hybridomas, a monoclonal antibody to a polypeptide of the invention can be identified and isolated by screening a recombinant combinatorial immunoglobulin library (e.g., an antibody phage display library) with the polypeptide to thereby isolate immunoglobulin library members that bind the polypeptide. Kits for generating and screening phage display libraries are commercially available (e.g., the Pharmacia Recombinant Phage Antibody System, Catalog No. 27-9400-01; and the Stratagene SurfZAP™ Phage Display Kit, Catalog No. 240612). Additionally, examples of methods and reagents particularly amenable for use in generating and screening antibody display library can be found in, for example, U.S. Pat. No. 5,223,409; PCT Publication No. WO 92/18619; PCT Publication No. WO 91/17271; PCT Publication No. WO 92/20791; PCT Publication No. WO 92/15679; PCT Publication No. WO 93/01288; PCT Publication No. WO 92/01047; PCT Publication No. WO 92/09690; PCT Publication No. WO 90/02809; Fuchs et al., Bio/Technology 9: 1370-1372 (1991); Hay et al., Hum. Antibod. Hybridomas 3:81-85 (1992); Huse et al., Science 246: 1275-1281 (1989); and Griffiths et al., EMBO J. 12:725-734 (1993).

[0317] Additionally, recombinant antibodies, such as chimeric and humanized monoclonal antibodies, comprising both human and non-human portions, which can be made using standard recombinant DNA techniques, are within the scope of the invention. Such chimeric and humanized monoclonal antibodies can be produced by recombinant DNA techniques known in the art.

[0318] In general, antibodies of the invention (e.g., a monoclonal antibody) can be used to isolate a polypeptide of the invention by standard techniques, such as affinity chromatography or immunoprecipitation. A polypeptide-specific antibody can facilitate the purification of natural polypeptide from cells and of recombinantly produced polypeptide expressed in host cells. Moreover, an antibody specific for a polypeptide of the invention can be used to detect the polypeptide (e.g., in a cellular lysate, cell supernatant, or tissue sample) in order to evaluate the abundance and pattern of expression of the polypeptide. Antibodies can be used diagnostically to monitor protein levels in tissue as part of a clinical testing procedure, e.g., to, for example, determine the efficacy of a given treatment regimen. The antibody can be coupled to a detectable substance to facilitate its detection. Examples of detectable substances include various enzymes, prosthetic groups, fluorescent materials, luminescent materials, bioluminescent materials, and radioactive materials. Examples of suitable enzymes include horseradish peroxidase, alkaline phosphatase, beta-galactosidase, or acetylcholinesterase; examples of suitable prosthetic group complexes include streptavidin/biotin and avidin/biotin; examples of suitable fluorescent materials include umbelliferone, fluorescein, fluorescein isothiocyanate, rhodamine, dichlorotriazinylamine fluorescein, dansyl chloride or phycoerythrin; an example of a luminescent material includes luminol; examples of bioluminescent materials include luciferase, luciferin, and aequorin, and examples of suitable radioactive material include ¹²⁵I, ¹³¹I, ³⁵S or ³H.

[0319] Antibodies may also be useful in pharmacogenomic analysis. In such embodiments, antibodies against variant proteins encoded by nucleic acids according to the invention, such as variant proteins that are encoded by nucleic acids that contain at least one polymorpic marker of the invention, can be used to identify individuals that require modified treatment modalities.

[0320] Antibodies can furthermore be useful for assessing expression of variant proteins in disease states, or in an individual with a predisposition to a disease related to the function of the protein, such as one or more of the vascular conditions disclosed herein (e.g., abnormal ECG measures, Atrial Fibrillation, Atrial Flutter, Stroke). Antibodies specific for a variant protein of the present invention that is encoded by a nucleic acid that comprises at least one polymorphic marker or haplotype as described herein can be used to screen for the presence of the variant protein, for example to screen for a predisposition to a vascular condition as described herein, as indicated by the presence of the variant protein.

[0321] Antibodies can be used in other methods. Thus, antibodies are useful as diagnostic tools for evaluating proteins, such as variant proteins of the invention, in conjunction with analysis by electrophoretic mobility, isoelectric point, tryptic or other protease digest, or for use in other physical assays known to those skilled in the art. Antibodies may also be used in tissue typing. In one such embodiment, a specific variant protein has been correlated with expression in a specific tissue type, and antibodies specific for the variant protein can then be used to identify the specific tissue type.

[0322] Subcellular localization of proteins, including variant proteins, can also be determined using antibodies, and can be applied to assess aberrant subcellular localization of the protein in cells in various tissues. Such use can be applied in genetic testing, but also in monitoring a particular treatment modality. In the case where treatment is aimed at correcting the expression level or presence of the variant protein or aberrant tissue distribution or developmental expression of the variant protein, antibodies specific for the variant protein or fragments thereof can be used to monitor therapeutic efficacy.

[0323] Antibodies are further useful for inhibiting variant protein function, for example by blocking the binding of a variant protein to a binding molecule or partner. Such uses can also be applied in a therapeutic context in which treatment involves inhibiting a variant protein's function. An antibody can be for example be used to block or competitively inhibit binding, thereby modulating (i.e., agonizing or antagonizing) the activity of the protein. Antibodies can be prepared against specific protein fragments containing sites required for specific function or against an intact protein that is associated with a cell or cell membrane. For administration in vivo, an antibody may be linked with an additional therapeutic payload, such as radionuclide, an enzyme, an immunogenic epitope, or a cytotoxic agent, including bacterial toxins (diphtheria or plant toxins, such as ricin). The in vivo half-life of an antibody or a fragment thereof may be increased by pegylation through conjugation to polyethylene glycol.

[0324] The present invention further relates to kits for using antibodies in the methods described herein. This includes, but is not limited to, kits for detecting the presence of a variant protein in a test sample. One preferred embodiment comprises antibodies such as a labelled or labelable antibody and a compound or agent for detecting variant proteins in a biological sample, means for determining the amount or the presence and/or absence of variant protein in the sample, and means for comparing the amount of variant protein in the sample with a standard, as well as instructions for use of the kit.

[0325] The present invention will now be exemplified by the following non-limiting examples.

### Example 1

### Several Common Variants Modulate Heart Rate, PR Interval and QRS Duration and Affect Risk of Cardiac Arrhythmias

[0326] To search for sequence variants that associate with HR, PR interval, QRS duration and QT interval in a population of European origin, we performed a GWAS on ten thousand Icelanders using the Illumine HumanHap300 and HumanHapCNV370 bead chips (Table 2). We then attempted to replicate the observed associations in additional ten thousand Icelanders (Table 2). All subjects had ECG data from the Landspitali University Hospital in Reykjavik, Iceland (see Methods). Individuals with AF, PM and/or defibrillator implants were excluded from PR interval, QRS duration and QT interval scans. Individuals with prolonged QRS interval (>120 ms) were also excluded from the QT interval analysis. The analysis was performed by regressing the measured parameters, adjusted for birth cohort, age at measurement and sex, on SNP allele counts. The QT interval was additionally adjusted for heart rate. The PR interval, QRS duration, QT interval and heart rate information were obtained for the same individuals, allowing us to calculate their correlations. The strongest observed correlation between ECG parameters was between the QRS duration and the HR adjusted QT interval (correlation=0.44, see Table 3 for all pair-wise correlations) whereas the correlation between PR vs QRS and PR vs QT was much weaker (0.09 and 0.06, respectively).

[0327] Due to the known correlation between the various ECG parameters and arrhythmias, we systematically tested all ECG parameter-associated SNPs in AF, SSS, advanced (second and third degree) atrioventricular block (AVB) and a PM population (see descriptions of sample sets in methods below).

### Methods

[0328] The study was approved by the Data Protection Commission of Iceland and the National Bioethics Committee of Iceland. Written informed consent was obtained from all patients and controls. Personal identifiers associated with medical information and blood samples were encrypted with a third-party encryption system as provided by the Data Protection Commission of Iceland.

### ECG Study Sample

[0329] This analysis included all ECGs obtained and digitally stored at the Landspitali University Hospital, Reykjavik, the largest medical center in Iceland, from 2004 to 2008. The ECGs were digitally recorded with the Philips PageWriter Trim III and PageWriter 200 cardiographs and stored in the Philips TraceMasterVue ECG Management System. These were ECGs obtained in all hospital departments, from inpatients and outpatients, representing unselected general medical and surgical patients. Digitally measured ECG waveforms and parameters were extracted from the database for analysis. The Philips PageWriter Trim III QT interval measurement algorithm has been previously described and shown to fulfill industrial ECG measurement accuracy standards⁶⁴. The Philips PR interval and QRS complex measurements have been shown to fulfill industrial accuracy standards⁶⁵. Individuals with atrial fibrillation, pacemakers and/or defibrillators implants and prolonged QRS interval (>120 ms), indicating abnormal conduction, were excluded.

### Icelandic Atrial Fibrillation Sample

[0330] This study sample included patients diagnosed with AF and/or atrial flutter (AFL) (International Classification of Diseases (ICD) 10 code 148 and ICD 9 code 427.3) at Landspitali University Hospital in Reykjavik, the only tertiary referral centre in Iceland, and at Akureyri Regional Hospital, the second largest hospital in Iceland, from 1987 to 2008. All diagnoses were confirmed with a 12-lead ECG. The AF/AFL-free controls used in this study consisted of controls randomly selected from the Icelandic genealogical database and individuals from other ongoing related, but not cardiovascular, genetic studies at deCODE. Controls with first-degree relatives (siblings, parents or offspring) with AF/AFI, or a first-degree control relative, were excluded from the analysis.

### Icelandic Sick Sinus Syndrome Sample

[0331] This sample set included patients that received the discharge diagnosis of SSS (International Classification of Diseases (ICD) 10 code 149.5 and ICD 9 code 427.8) at Landspitali University Hospital in Reykjavik, from 1987 to 2008. All diagnoses were confirmed with a 12-lead ECG. The SSS-free controls used in this study consisted of controls randomly selected from the Icelandic genealogical database and individuals from other ongoing related, but not cardiovascular, genetic studies at deCODE. Controls with first-degree relatives (siblings, parents or offspring) with SSS, or a first-degree control relative, were excluded from the analysis.

### Icelandic Atrioventricular Block Sample

[0332] This sample set included all patients that received the discharge diagnosis of second and/or third degree AVB (International Classification of Diseases (ICD) 10 codes 144.1, 144.2 and 144.3 and ICD 9 codes 426.0 and 426.1) at Landspitali University Hospital in Reykjavik, from 1987 to 2008. All diagnoses were confirmed with a 12-lead ECG. The AVB-free controls used in this study consisted of controls randomly selected from the Icelandic genealogical database and individuals from other ongoing related, but not cardiovascular, genetic studies at deCODE. Controls with first-degree relatives (siblings, parents or offspring) with AVB, or a first-degree control relative, were excluded from the analysis.

### Icelandic Pacemaker Population Sample

[0333] This study included all patients that received a permanent pacemaker (PM) implantation at the Landspitali University Hospital in Reykjavik, also from 1987 to 2008. The causes of pacemaker implantation break down as follows: SSS=676, AVB=263, AF=240, other=41. All diagnoses were confirmed with a 12-lead ECG. The PM-free controls used in this study consisted of controls randomly selected from the Icelandic genealogical database and individuals from other ongoing related, but not cardiovascular, genetic studies at deCODE. Controls with first-degree relatives (siblings, parents or offspring) with PM, or a first-degree control relative, were excluded from the analysis.

Norwegian Atrial Fibrillation Sample from the Tromsø Study

[0334] The Tromsø Study AF population has been described previously {Gudbjartsson, 2009 #452}. Briefly, the Tromsø Study is a population-based prospective study with repeated health surveys in the municipality of Tromsø, Norway. The population is being followed-up on an individual level with registration and validation of diseases and death and an endpoint registry has been established for CVD. For the current project, one sex- and age matched control was selected for each case of AF from the population based Tromsø 4 survey. Participants in the Tromsø Study gave informed, written consent. The study was approved by the Regional Committee for Medical Research Ethics.

### Illumina Genome-Wide Genotyping

[0335] All Icelandic discovery samples were assayed with the Illumina HumanHap300 or HumanHapCNV370 bead chips (Illumina, SanDiego, Calif., USA), containing 317,503 and 370,404 haplotype tagging SNPs derived from phase I of the International HapMap project. Only SNPs present on both chips were included in the analysis and SNPs were excluded if they had (a) yield lower than 95% in cases or controls, (b) minor allele frequency less than 1% in the population, or (c) showed significant deviation from Hardy-Weinberg equilibrium in the controls (P<0.001). Any samples with a call rate below 98% were excluded from the analysis. The final analysis included, 306,060 SNPs.

### Single SNP Genotyping

[0336] Replication single SNP genotyping was carried out by deCODE genetics in Reykjavik, Iceland, applying the Centaurus (Kutyavin et al. 2006) (Nanogen) platform. The quality of each Centaurus SNP assay was evaluated by genotyping each assay on the CEU samples and comparing the results with the HapMap data. All assays had mismatch rate<0.5%. Additionally, all markers were re-genotyped on more than 10°/0 of samples typed with the Illumina platform resulting in an observed mismatch in less than 0.5% of samples.

### Quantitative Trait Analysis

[0337] All ECG measurements were adjusted for sex, year of birth and age at measurement after log transformation. In addition, the QT interval duration was adjusted for heart rate. After adjustment, the residuals ECG measurements were standardized using quantile-quantile standardization. For individuals with multiple ECG measurements, the mean standardized residual value was used. Drugs are known to influence many ECG variables, including specifically the heart rate, PR interval and QT interval. We were not able to adjust for drugs in our analysis as detailed drug information was not available for our sample set. However, Pfeufer et al in their GWAS on the QT interval¹⁷, found that accounting for QT-prolonging drugs explained only 0.25%-0.51% of the QT variance in their individual studies, and did not adjust for drugs in their meta-analysis.

[0338] For each SNP, a classical linear regression, using the genotype as an additive covariate and the standardized blood measurement as a response, was fit to test for association. The test statistics from the GWAS were scaled by the method of genomic control⁶⁶ obtained by comparing the observed median of all χ2-test statistic to the value predicted by theory (0.675²). The estimated inflation factors were 1.10, 1.16, 1.16 and 1.09 for the QT interval, PR interval, QRS complex and heart rate, respectively.

[0339] For the SNPs previously reported to associate with QT interval duration, that were not present on the Illumine chips, expected allele counts were obtained using the IMPUTE software⁶⁷, using the HapMap CEU samples as a training set⁵⁰. The test for association was then performed using the expected allele counts as covariates. The imputation information was estimated by the ratio of the observed variance of allele counts and the predicted variance of allele counts from the observed allele frequencies under the assumption of Hardy-Weinberg equilibrium.

### Heritability Estimation

[0340] The heritability of ECG measurements was estimated as twice the correlation between sibling pairs. The standardized residual measurements described above were used for the estimation of correlation.

### Case-Control Association Analysis

[0341] Association with disease phenotypes, such as AF, CVB and PM, was tested with a likelihood procedure described by Gretarsdottir, S. et al⁶⁸.

### Results

### Heritability of ECG Measures

[0342] We estimated the heritability of each of the four ECG variables assessed in this study based on twelve thousand Icelandic sibling pairs. Our analysis revealed estimates similar to those previously reported in other populations. The estimated heritability was 18% for HR, 40% for the PR interval, 33% for the QRS complex duration and 30% for the QT interval.

Several Sequence Variants Associate with PR Interval and QRS Duration

[0343] From the GWAS of PR interval, QRS complex duration and HR in ten thousand Icelanders, SNPs from seven regions were chosen for replication in additional ten thousand Icelanders with ECG information (Table 2).

[0344] The GWAS on the PR interval and QRS complex yielded GWS signals (P<1.6×10⁻⁷) for one locus common to the PR interval and the QRS complex and three PR interval specific loci. In addition to these loci, signals from two additional loci near GWS for QRS were tested in additional ten thousand replication samples. In the combined analysis of the discovery and replication samples we observed significant association between the PR interval and QRS complex and several loci (Table 2).

[0345] The combined analysis showed GWS association between TBX5 on chromosome 12q24.1 and the PR interval, QRS duration and QT interval and GWS association between SCN10A on 3p22.2 and both the PR interval and QRS duration. Two loci showed GWS association with the PR interval only, ARHGAP24 on 4q22.1 and CAV1 on 7q31, and another two loci to the QRS duration only, on chromosomes 6p21.31 (near CDKN1A) and 10q21.1 (near DKK1). Note that the QRS association at 10q21.1 borders on GWS (P=1.6×10-7) after adjustment for the four ECG parameters being tested (GWS threshold adjusting for four traits tested: P<4×10-8), although the six other primary associations to ECG parameters satisfy this more stringent threshold (Table 2).

[0346] The TBX5 variant, rs3825214[G] (freq=0.22), that associates with prolongation of the PR interval (combined P=3.3×10⁻¹²), QRS duration (combined P=3.0×10⁻¹³) and QT interval (combined P=9.5×10⁻⁸) in our data is located in the last intron of the TBX5 gene. As discussed before, the QRS duration and QT interval are correlated (correlation=0.44 in our data), and the association of rs3825214 with QT interval is weaker after conditioning on QRS duration but still significant (P=0.0065). No other genes share LD block with rs3825214. TBX5 encodes a transcription factor and plays a key role in cardiac development. Mutations in this gene cause limb and cardiac malformation in the Holt-Oram syndrome (HOS)^{20,21} with the main structural cardiac abnormalities being atrial and ventricular septal defects. Conduction disorders are frequently present (also in the absence of structural defects) and may affect the SN and AVN as well as the bundle branches, ranging in severity from asymptomatic conduction disturbances to SCD due to heart block²². TBX5 is widely expressed in the AVN and ventricular bundle branches in mice and is critical for development of the murine cardiac conduction system²³. TbxS has also been shown to regulate the connexin 40 gene in mice²⁴, a gap junction protein associated with electrical conduction. Interestingly, TbxS interacts with another transcription factor, Mef2c, to activate expression of the MYH6 gene²⁵ that associates with HR in our data. Most recently, a large GWAS reported association between diastolic blood pressure (DBP) and a common variant, rs2384550, close to TBX3 and T8X5²⁶. There is no correlation between this variant and the TBX5 variant reported here (r²=0.0018, D=0.058 in the Icelandic data) and similarly, the DBP variant did not associate with any of the four ECG variables.

[0347] The association between SCN10A and the PR interval and QRS duration was compelling in our data. The strongest association observed (combined P=9.5×10⁻⁵⁹ for prolonged PR interval, P=3.5×10⁻⁹ for prolonged QRS duration) was with rs6795970[A] (freq=0.36), representing a missense mutation, V1073A. SCN10A encodes a tetrodotoxin (TTX) resistant voltage-gated sodium channel (α-subunit), implicated in pain perception and modulation, that has previously been found primarily expressed in small sensory neurons in dorsal root ganglia^{27,28}. The most closely related human sodium channel gene is the cardiac voltage-gated sodium channel, SCN5A, with 70.4% similarity to SCN10A²⁷ and located next to SCN10A on chromosome 3. In contrast to SCNA5, the SCN10A gene has not previously been linked to cardiac function. Mutations in SCN5A have been demonstrated in several cardiac disorders including long QT syndrome, Brugada syndrome, SSS and AF²⁹, and recently, common variants in SCN5A were associated with the QT interval in two large GWAS^{16,17}.

[0348] We observed a strong association between prolongation of the PR interval and a common intronic variant in ARHGAP24, rs7660702[T] (freq=0.74, combined P=2.5×10⁻¹⁷). No other genes share the LD block with ARHGAP24 and this variant. ARHGAP24 encodes one of the Rho GTPase-activating proteins (RhoGAPs)³⁹, modulators of the Rho family of small GTPases (members of the Ras superfamily), binary molecular switches that are turned on and off in response to a variety of extracellular stimuli³¹. These GTPases are implicated in almost every fundamental cellular process and are crucially involved in the regulation of cell cytoskeletal organization, cell maturation and transcription³¹. The RhoGAPs accelerate the low intrinsic GTP hydrolysis rate of most Rho family members, converting their substrates to a GDP-bound inactive state. ARHGAP24 has specifically been shown to be involved in regulation of angiogenesis, actin remodeling and cell polarity^{32,33} but has not been linked to myocardial depolarization before. Abnormal expression of RhoGAP proteins has been observed in certain cancers but current knowledge of the normal biological function of most RhoGAPs is rudimentary.

[0349] The CAV1 variant, rs3807989[A] (freq=0.40), is an intronic variant that showed GWS association with prolongation of the PR interval (combined P=7.4×10⁻¹³) and secondary association with prolonged QRS duration (combined P=0.00011). The only other gene in the same LD block is CAV2. The caveolins are a family of highly conserved integral membrane proteins involved in dynamic and regulatory processes occurring at the plasma membrane, including vesicular trafficking and signal transduction³⁴. They act as scaffolding proteins and provide a framework for organization of specific caveolin-interacting lipids and regulation of lipid-modified signaling molecules³⁵. CAV-1 is involved in the regulation of the nitric oxide (NO) pathway^{36,37}, and CAV-1 knockout mice develop a dramatic increase in systemic NO levels, pulmonary hypertension, dilated cardiomyopathy and decreased lifespan³⁸.

[0350] Two common variants associated with prolongation of the QRS duration only, rs1321311[T] on chromosome 6p21.31 (freq=0.21, combined P=2.7×10⁻¹⁰), and rs1733724[T] on 10q21.1 (freq=0.21, combined P=6.5×10⁻⁸). The SNP rs1321311 shares LD block with one gene, CDKN1A, an important mediator of p53-dependent cell cycle arrest and thus a key player in cellular response to DNA damage and tumor growth suppression³⁹. The closest genes to rs1733724 include DKK1, CSTF2T, PRKG1 and MBL2. Further investigation is required to uncover the biological pathways connecting these two loci to QRS duration.

### Association Between Heart Rate and the MYH6 Gene on Chromosome 14q11.2-q13

[0351] We observed GWS association between the non-synonymous variant rs365990[G] (A1101V) in MYH6 (freq=0.34) and increased HR (combined P=9.4×10¹¹) with secondary association with shortened PR interval (combined P=1.8×10⁻⁵). The association with shortened PR interval remained significant after adjusting for the effect on HR (combined P=0.0027). Two different sarcomeric myosin heavy chain (MyHC) isoforms are expressed in the mammalian myocardium, α-MyHC (MYH6) and β-MyHC (MYH7)⁴⁰, with the two genes oriented in a head-to-tail tandem on chromosome 14⁴¹. Human hearts predominantly express the β isoform and little of the α isoform found there is primarily expressed in atrial tissue^{42,43}. The two isoforms have distinct properties as the α-MyHC exhibits markedly faster actin-activated ATPase activity⁴⁴ and actin filament sliding velocity⁴⁵ than β-MyHC, and myocytes containing only α-MyHC generate nearly three times greater peak normalized power than myocytes expressing exclusively β-MyHC⁴⁶. Despite the relatively small amount of α-MyHC expressed in the myocardium, a body of evidence suggests that MyHC isoform expression critically affects myocardial performance, such that a relatively small change in α-MyHC expression may significantly augment contractile capacity under stress⁴⁷. Mutations in MYH7 are a well known cause of hypertrophic cardiomyopathy, and recently, mutations in MYH6 have also been demonstrated in several cases of cardiomyopathy, both hypertrophic and dilated⁴⁸, and also in a family with dominantly inherited atrial septal defect (ASD)⁴⁹.

### Associations Between Several Loci and Cardiac Arrhythmias

[0352] The seven loci found to associate at a GWS level with ECG variables in the combined Icelandic data were next tested for association in Icelandic and Norwegian case-control samples of AF and Icelandic case-control samples of SSS, advanced AVB and an Icelandic PM population (see Tables 4 and 5 and descriptions of sample sets). We observed association between two loci, TBX5 and CAV1, and Atrial Fibrillation (N=4,304 cases and 46,508 controls, Table 5). For both variants, the allele that correlates with prolonged PR interval associates with less risk of AF; TBX5 (OR=0.88, P=4.0×10⁻⁵ for rs3825214[G]; risk allele rs3825214[A] with OR=1/0.88=1.14) and CAV1 (OR=0.92, P=0.00032 for rs3807989[A]; risk allele rs3807989[G] with OR=1/0.92=1.09).

[0353] For the TBX5 locus we also found association with advanced AVB (OR=1.27, P=0.0067 for rs3825214[G], N=359 cases, 48,994 controls) (Table 4). The allele that associates with prolonged PR interval carries an increased risk of advanced AVB. Finally, there was correlation between SCN10A and PM placement in the Icelandic PM sample set (OR=1.13, P=0.0029 for rs6795970[A], N=1,252 cases and 48,114 controls, Table 4). The same allele associates with prolonged PR/QRS duration and PM placement (See Tables 2 and 4). Further examination of the PM population according to the underlying arrhythmia did not reveal significant or stronger association with any one of the underlying diseases.

### Discussion

[0354] Through a large GWAS of Icelanders with ECG information we have discovered associations between several common sequence variants and HR, PR interval and QRS duration. Only one of the other genes identified, TBX5, has previously been implicated directly in cardiac conduction, although MYH6, the alpha-myosin cardiac heavy chain, and SCN10A, a sodium channel gene with marked similarity to the cardiac sodium channel, were good a priori candidates.

[0355] There are correlations between several of the ECG parameter SNPs and diseases, translating our findings to potential clinical relevance. We describe associations between common variants in CAV1 and AF, and TBX5 and both AF and advanced AVB. For both loci, the alleles that correlate with shorter PR interval predispose to AF. While the literature generally suggests a concordance between prolonged PR interval, representing delayed intra- and interatrial conduction, and risk of AF, familial syndromes have been described, including Lown-Ganong-Levine, exhibiting short PR, reflecting accelerated AV conduction, and increased risk of AF and other supraventricular tachycardias^{53,54}. Interestingly, a large family with atypical HOS, gain-of-function TBX5 mutation and paroxysmal AF was recently described⁵⁵. The observed associations with clinical syndromes require confirmation in additional cohorts.

[0356] While the associations we have identified explain only a small fraction of the variance of the ECG measures studied, the observed correlations with clinical disease yet again demonstrate how studies of intermediate traits may lead to discovery of clinically pertinent biological pathways. This approach has previously been successful in the study of SCD through the QT interval¹⁵, lung cancer and peripheral arterial disease through smoking quantity⁵⁶, asthma and myocardial infarction through serum eosinophil counts⁵⁷ and risk of coronary artery disease through LDL serum concentration⁵⁸.

[0357] Two of the associated SNPs are coding non-synonymous variants, in SCN10A and MYH6, and others are in functionally relevant genes, including TBX5, suggesting causality. Functional studies are necessary to further elucidate the biological pathways that are represented by the observed common sequence variants and modulate cardiac conduction and clinical syndromes. Additionally, resequencing of the candidate genes may identify common and rare functional variants with greater impact on cardiac conduction.

### Accession Numbers

[0358] ARHGAP24: AK091196 and NM031305, CAV1: AF125348 and NM001753, CAV2: AF035752 and NM001233, CDKN1A: UO3106 and NM078467, CSTF2T: AB014589 and NM015235, DKK1: NM012242, MBL2: AF360991 and NM000242, MYH6: D00943, PRKG1: NM006258, TBX5: U89353 and NM080717, SCN5A: A3310893 and NM198056, SCN10A: AF117907 and NM006514.

TABLE 1
Shows an overview of the two Icelandic ECG study populations

| | | | | | Avg. | | |
|---|---|---|---|---|---|---|---|
| | | | | | number | | |
| | Popula- | | | Age^{a} | of measure- | Mean | |
| Trait | tion | Sex | N | (SD) | ments^{b} | (SD) | |
| QT | Discov- | Male | 4,466 | 66 (14) | 2.4 | 388 | ms |
| | ery | Female | 5,395 | 66 (16) | 2.0 | 385 | ms |
| | Replica- | Male | 4,171 | 60 (15) | 1.9 | 385 | ms |
| | tion | Female | 4,646 | 62 (15) | 1.7 | 388 | ms |
| PR | Discov- | Male | 4,803 | 66 (14) | 2.5 | 178 | ms |
| | ery | Female | 5,570 | 66 (16) | 2.0 | 168 | ms |
| | Replica- | Male | 4,400 | 60 (15) | 1.9 | 175 | ms |
| | tion | Female | 4,752 | 62 (15) | 1.7 | 167 | ms |
| QRS | Discov- | Male | 4,811 | 66 (14) | 2.5 | 99 | ms (17) |
| | ery | Female | 5,575 | 66 (16) | 2.0 | 90 | ms (14) |
| | Replica- | Male | 4,400 | 61 (15) | 1.9 | 97 | ms (15) |
| | tion | Female | 4,753 | 62 (15) | 1.7 | 89 | ms (12) |
| HR | Discov- | Male | 6,144 | 73 (16) | 3.1 | 73 | bpm |
| | ery | Female | 6,616 | 68 (16) | 2.4 | 76 | bpm |
| | Replica- | Male | 5,107 | 62 (15) | 2.3 | 72 | bpm |
| | tion | Female | 5,245 | 62 (16) | 1.9 | 73 | bpm |

^{a}Age at measurement.
^{b}Geometric mean of the number of measurements per individual.
SD = standard deviation, ms = milliseconds, bpm = beats per minute.

TABLE 2
Presenting association of common sequence variants with ECG measures for two Icelandic datasets and their combined values.

| | | | | | | | Discovery | | Follow-up | | Combined | |
|---|---|---|---|---|---|---|---|---|---|---|---|---|
| Closest | | | | | | Mea- | Ef- | P- | Ef- | P- | Effect^{b} | P- |
| gene | SNP | All | Chr | Position | Freq^{a} | sure | fect^{b} | value | fect^{b} | value | (95% CI) | val [symbol] |
| Missense | rs6795970 | A | 3 | 38,741,679 | 0.360 | PR | 15.06 | 6.2 · 10⁻³³ | 14.53 | 1.3 · 10⁻²⁷ | 14.81 (13.01, 16.60) | 9.5 · 10⁻ [symbol] |
| SCN10A | | | | | | QRS | 4.45 | 0.00026 | 6.02 | 1.7 · 10⁻⁶ | 5.17 (3.46, 6.89) | 3.5 · 10⁻ [symbol] |
| Intron | rs7660702 | T | 4 | 86,870,488 | 0.737 | PR | 8.93 | 1.3 · 10⁻¹⁰ | 7.97 | 2.9 · 10⁻⁸ | 8.46 (6.50, 10.42) | 2.5 · 10⁻ [symbol] |
| ARHGAP24 | | | | | | | | | | | | |
| Upstream | rs1321311 | T | 6 | 36,730,878 | 0.206 | QRS | 7.14 | 7.8 · 10⁻⁷ | 5.83 | 7.8 · 10⁻⁵ | 6.52 (4.50, 8.55) | 2.7 · 10⁻¹⁰ |
| CDKN1A | | | | | | | | | | | | |
| Intron | rs3807989 | A | 7 | 115,973,477 | 0.401 | PR | 6.60 | 7.1 · 10⁻⁸ | 6.19 | 2.0 · 10⁻⁶ | 6.40 (4.65, 8.15) | 7.4 · 10⁻¹³ |
| CAV1 | | | | | | QRS | 3.55 | 0.0026 | 3.02 | 0.014 | 3.30 (1.63, 4.97) | 0.00011 |
| Downstream | rs1733724 | T | 10 | 53,893,983 | 0.215 | QRS | 6.20 | 1.6 · 10⁻⁵ | 4.96 | 0.00099 | 5.62 (3.58, 7.66) | 6.5 · 10⁻⁸ |
| DKK1 | | | | | | | | | | | | |
| Intron | rs3825214 | G | 12 | 113,279,826 | 0.216 | QRS | 7.56 | 6.1 · 10⁻⁸ | 7.1 | 1.1 · 10⁻⁶ | 7.35 (5.37, 9.33) | 3.0 · 10⁻¹³ |
| TBX5 | | | | | | PR | 8.14 | 2.0 · 10⁻⁸ | 6.43 | 3.1 · 10⁻⁵ | 7.36 (5.29, 9.43) | 3.3 · 10⁻¹² |
| | | | | | | QT | 5.09 | 0.00069 | 6.82 | 2.7 · 10⁻⁵ | 5.88 (3.72, 8.03) | 9.5 · 10⁻⁸ |
| Missense | rs365990 | G | 14 | 22,931,651 | 0.341 | HR | 4.79 | 9.5 · 10⁻⁶ | 5.7 | 2.9 · 10⁻⁶ | 5.25 (3.66, 6.83) | 9.4 · 10⁻¹¹ |
| MYH6 | | | | | | PR | −4.17 | 0.001 | −3.73 | 0.0066 | −3.99 (−2.17, −5.82) | 1.8 · 10⁻⁵ |

Shown are the results for the discovery and follow-up samples and the two sample sets combined.
The sample sizes for the discovery/follow-up/combined samples for each ECG measure are as follows: PR interval 10,373/9,152/19,525; QRS complex 10,386/9,153/19,539; QT interval 9,861/8,817/18,678 and HR 12,760/10,352/23,112, respectively.
^{a}The reported allele frequencies are the frequencies in the combined sample sets.
^{b}Effects are given in percentage of standard deviation. The closest genes to the variants reported are shown for reference. [symbol]
indicates data missing or illegible when filed

TABLE 3
Shows correlation between all pairs of ECG measurements.

| Measure 1 | Measure 2 | Correlation |
|---|---|---|
| PR | QRS | 0.09 |
| PR | QT | 0.06 |
| QRS | QT | 0.44 |
| HR | PR | −0.23 |
| HR | QRS | −0.07 |
| HR | QT | 0.00 |

Note that the QT interval has been adjusted for HR.

TABLE 4
Presents association between ECG parameter loci and Icelandic case-control sample sets of atrial
fibrillation, pacemaker placement, sick sinus syndrome and advanced atrioventricular block.

| | | | | Atrial | | | | Sick sinus | | Advanced | |
|---|---|---|---|---|---|---|---|---|---|---|---|
| | | | | fibrillation | | Pacemaker | | syndrome | | AV blo [symbol] | |
| | | | | (N = 3,584) | | (N = 1,252) | | (N = 1,076) | | (N = 359) | |
| | Closest | | | OR | P- | OR | P- | OR | P- | OR | P- |
| SNP | gene^{a} | All | Chr | (95% CI) | value | (95% CI) | value | (95% CI) | value | (95% CI) | val [symbol] |
| rs6795970 | Missense | A | 3 | 0.97 (0.92, 1.03) | 0.31 | 1.13 (1.04, 1.23) | 0.0029 | 1.09 (1.00, 1.19) | 0.064 | 1.07 (0.91, 1.24) | 0.41 |
| | SCN10A | | | | | | | | | | |
| rs7660702 | Intron | T | 4 | 1.03 (0.98, 1.09) | 0.25 | 1.00 (0.91, 1.09) | 0.92 | 1.00 (0.90, 1.10) | 0.96 | 1.02 (0.86, 1.20) | 0.82 |
| | ARHGAP24 | | | | | | | | | | |
| rs1321311 | Upstream | T | 6 | 0.95 (0.89, 1.01) | 0.098 | 1.02 (0.93, 1.13) | 0.67 | 0.95 (0.85, 1.05) | 0.32 | 1.10 (0.92, 1.31) | 0.31 |
| | CDKN1A | | | | | | | | | | |
| rs3807989 | Intron | A | 7 | 0.93 (0.88, 0.98) | 0.0048 | 0.96 (0.89, 1.04) | 0.35 | 1.00 (0.91, 1.09) | 0.96 | 1.07 (0.93, 1.25) | 0.35 |
| | CAV1 | | | | | | | | | | |
| rs1733724 | Downstream | T | 10 | 1.04 (0.98, 1.10) | 0.23 | 1.07 (0.97, 1.18) | 0.15 | 1.09 (0.98, 1.21) | 0.10 | 1.08 (0.90, 1.29) | 0.39 |
| | DKK1 | | | | | | | | | | |
| rs3825214 | Intron | G | 12 | 0.88 (0.83, 0.94) | 8.5 · | 1.03 (0.94, 1.13) | 0.55 | 0.97 (0.88, 1.08) | 0.59 | 1.27 (1.07, 1.50) | 0.0067 |
| | TBX5 | | | | 10⁻⁵ | | | | | | |
| rs365990 | Missense | G | 14 | 1.04 (0.99, 1.10) | 0.13 | 0.94 (0.86, 1.02) | 0.13 | 0.94 (0.86, 1.03) | 0.18 | 0.93 (0.79, 1.08) | 0.33 |
| | MYH6 | | | | | | | | | | |

Shown is the marker name, the closest gene to the variant, risk allele, chromosome and odds ratio and P-value for all sample sets. [symbol]
indicates data missing or illegible when filed

TABLE 5
Shows association between ECG parameter loci in Icelandic and Norwegian AF case-control sample sets and combined results.

| | | | | Iceland | | Norway | | Combined | |
|---|---|---|---|---|---|---|---|---|---|
| | | | | N cases = 3,584, | | (N cases = 720, | | (N cases = 4,304, | |
| | | | | N controls = 45,783) | | N controls = 725) | | N controls = 46,508) | |
| SNP | Closest gene | All | Chr | OR (95% CI) | P-value | OR (95% CI) | P-value | OR (95% CI) | P-value |
| rs6795970 | Missense SCN10A | A | 3 | 0.97 (0.92, 1.03) | 0.31 | 0.97 (0.84, 1.14) | 0.74 | 0.97 (0.93, 1.02) | 0.29 |
| rs7660702 | Intron ARHGAP24 | T | 4 | 1.03 (0.98, 1.09) | 0.25 | 0.97 (0.83, 1.14) | 0.72 | 1.03 (0.97, 1.08) | 0.33 |
| rs1321311 | Upstream CDKN1A | T | 6 | 0.95 (0.89, 1.01) | 0.098 | 0.89 (0.75, 1.06) | 0.20 | 0.94 (0.89, 1.00) | 0.047 |
| rs3807989 | Intron CAV1 | A | 7 | 0.93 (0.88, 0.98) | 0.0048 | 0.80 (0.69, 0.93) | 0.0037 | 0.92 (0.87, 0.96) | 0.00032 |
| rs1733724 | Downstream DKK1 | T | 10 | 1.04 (0.98, 1.10) | 0.23 | 1.05 (0.88, 1.26) | 0.58 | 1.04 (0.98, 1.10) | 0.19 |
| rs3825214 | Intron TBX5 | G | 12 | 0.88 (0.83, 0.94) | 8.5 · 10⁻⁵ | 0.89 (0.75, 1.07) | 0.23 | 0.88 (0.83, 0.94) | 4.0 · 10⁻5 |
| rs365990 | Missense MYH6 | G | 14 | 1.04 (0.99, 1.10) | 0.13 | 1.00 (0.85, 1.18) | 0.98 | 1.04 (0.99, 1.09) | 0.14 |

Shown is the marker name, the closest gene to the variant, risk allele, chromosome. Odds ratio and P-value for separate and combined sample sets.

TABLE 6
List of surrogate markers to rs6795970 on Chromosome
3 with R² >0.2 in the HapMap CEU dataset.

| Marker | Correlated | Pos in NCBI | | | | Seq ID |
|---|---|---|---|---|---|---|
| Name | Allele | Build 36 | R² | D′ | P-value | NO: |
| rs6599240 | 1 | 38713721 | 0.51396 | 0.806534 | 3.46E−14 | 1 |
| rs11129800 | 4 | 38719374 | 0.541438 | 0.836706 | 2.87E−14 | 2 |
| rs11129801 | 3 | 38725379 | 0.235547 | 1 | 4.63E−10 | 3 |
| rs11710006 | 1 | 38727794 | 0.257268 | 1 | 5.97E−10 | 4 |
| rs11924846 | 2 | 38731570 | 1 | 1 | 1.81E−37 | 5 |
| rs9990137 | 1 | 38734469 | 0.443478 | 1 | 7.21E−17 | 6 |
| rs6805187 | 2 | 38735510 | 0.443478 | 1 | 1.16E−16 | 7 |
| rs7617547 | 3 | 38738504 | 0.342524 | 1 | 1.87E−13 | 8 |
| rs6771157 | 3 | 38738867 | 0.260745 | 1 | 1.09E−10 | 9 |
| rs4076737 | 2 | 38739786 | 1 | 1 | 1.01E−36 | 10 |
| rs12632942 | 1 | 38740002 | 0.25745 | 1 | 8.36E−11 | 11 |
| rs7430477 | 2 | 38740494 | 0.492754 | 1 | 3.30E−18 | 12 |
| rs6795970 | 1 | 38741679 | 1 | 1 | | 13 |
| rs6801957 | 4 | 38742319 | 0.93228 | 0.965876 | 3.05E−30 | 14 |
| rs7433306 | 2 | 38745643 | 0.966314 | 1 | 1.23E−34 | 15 |
| rs6780103 | 3 | 38746468 | 0.244908 | 1 | 2.62E−10 | 16 |
| rs6790396 | 2 | 38746929 | 0.781825 | 0.919395 | 5.18E−21 | 17 |
| rs6800541 | 2 | 38749836 | 0.932942 | 0.965889 | 1.31E−30 | 18 |
| rs7615140 | 4 | 38757030 | 0.365219 | 0.940648 | 1.80E−10 | 19 |
| rs6599250 | 4 | 38759033 | 0.932942 | 0.965889 | 1.31E−30 | 20 |
| rs6599251 | 3 | 38760813 | 0.783405 | 0.963023 | 1.90E−24 | 21 |
| rs7430451 | 2 | 38770499 | 0.350851 | 0.938908 | 5.04E−10 | 22 |
| rs6599254 | 1 | 38770559 | 0.932942 | 0.965889 | 1.31E−30 | 23 |
| rs6599255 | 1 | 38771419 | 0.778951 | 0.92858 | 7.83E−24 | 24 |
| rs12630795 | 1 | 38771989 | 0.214098 | 1 | 3.10E−09 | 25 |
| rs6798015 | 2 | 38773840 | 0.746427 | 0.925692 | 2.39E−22 | 26 |
| rs6763876 | 4 | 38775751 | 0.236944 | 0.919317 | 2.55E−07 | 27 |
| rs6599256 | 3 | 38776229 | 0.236944 | 0.919317 | 2.55E−07 | 28 |
| rs7641844 | 1 | 38777255 | 0.222485 | 0.905737 | 2.96E−06 | 29 |
| rs7432804 | 1 | 38778513 | 0.236944 | 0.919317 | 2.55E−07 | 30 |
| rs7430439 | 3 | 38778643 | 0.235513 | 0.510992 | 2.09E−06 | 31 |
| rs7651106 | 4 | 38779345 | 0.5233 | 0.950002 | 4.03E−15 | 32 |
| rs6599257 | 2 | 38779592 | 0.5233 | 0.950002 | 4.03E−15 | 33 |
| rs7610489 | 1 | 38781482 | 0.538271 | 0.950007 | 5.01E−15 | 34 |
| rs7650384 | 2 | 38781515 | 0.395362 | 0.936308 | 2.95E−10 | 35 |
| rs4414778 | 4 | 38787169 | 0.229284 | 0.91387 | 8.01E−07 | 36 |
| rs10212338 | 1 | 38787654 | 0.522914 | 0.949651 | 8.10E−15 | 37 |

The table includes, for each SNP, the correlating allele with allele A of rs6795970, position in NCBI build 36, and r², D′ and P-value for the test of correlation between the two markers.

TABLE 7
List of surrogate markers to rs7660702 on Chromosome
4, with R² >0.2 in the HapMap CEU dataset.

| Marker | Correlated | Pos in NCBI | | | | Seq ID |
|---|---|---|---|---|---|---|
| Name | Allele | Build 36 | R² | D′ | P-value | NO: |
| rs7698203 | 4 | 86823753 | 0.201953 | 0.871243 | 5.12E−06 | 38 |
| rs6849659 | 1 | 86829480 | 0.638204 | 0.944142 | 1.25E−16 | 39 |
| rs2101134 | 1 | 86831373 | 0.772296 | 1 | 9.61E−24 | 40 |
| rs10017047 | 3 | 86834415 | 0.456462 | 0.930433 | 2.01E−12 | 41 |
| rs12648692 | 1 | 86837105 | 0.220999 | 1 | 4.21E−07 | 42 |
| rs13134382 | 3 | 86837827 | 0.207596 | 0.6802 | 3.16E−06 | 43 |
| rs17010599 | 4 | 86838704 | 0.239669 | 1 | 1.01E−07 | 44 |
| rs7655100 | 1 | 86839892 | 0.816682 | 1 | 6.15E−26 | 45 |
| rs7677064 | 4 | 86839908 | 0.475018 | 0.932274 | 5.87E−13 | 46 |
| rs10033273 | 2 | 86840097 | 0.457043 | 0.931024 | 1.00E−12 | 47 |
| rs7439720 | 1 | 86840878 | 0.457043 | 0.931024 | 1.00E−12 | 48 |
| rs900204 | 3 | 86841290 | 0.223745 | 0.693487 | 9.57E−07 | 49 |
| rs11731040 | 2 | 86841367 | 0.239669 | 1 | 1.01E−07 | 50 |
| rs931195 | 1 | 86843465 | 0.457043 | 0.931024 | 1.00E−12 | 51 |
| rs17010632 | 1 | 86844920 | 0.457043 | 0.931024 | 1.00E−12 | 52 |
| rs1871864 | 1 | 86848126 | 0.441842 | 0.926246 | 8.42E−12 | 53 |
| rs1871865 | 3 | 86848557 | 0.457043 | 0.931024 | 1.00E−12 | 54 |
| rs1482085 | 3 | 86849536 | 0.810964 | 1 | 5.18E−25 | 55 |
| rs11735639 | 4 | 86850942 | 0.457043 | 0.931024 | 1.00E−12 | 56 |
| rs4413396 | 3 | 86851795 | 0.457043 | 0.931024 | 1.00E−12 | 57 |
| rs13146939 | 1 | 86852284 | 0.459761 | 0.927606 | 5.12E−12 | 58 |
| rs13152150 | 1 | 86852331 | 0.457043 | 0.931024 | 1.00E−12 | 59 |
| rs13128115 | 1 | 86852508 | 0.456175 | 0.929484 | 1.42E−12 | 60 |
| rs12509904 | 3 | 86854591 | 0.22264 | 0.690722 | 1.08E−06 | 61 |
| rs12650494 | 2 | 86856334 | 0.239669 | 1 | 1.10E−07 | 62 |
| rs10012090 | 3 | 86857950 | 1 | 1 | 2.84E−32 | 63 |
| rs7691602 | 1 | 86859569 | 0.213759 | 1 | 5.01E−07 | 64 |
| rs7692808 | 3 | 86860173 | 1 | 1 | 1.48E−32 | 65 |
| rs7658797 | 2 | 86861738 | 1 | 1 | 9.56E−29 | 66 |
| rs17010697 | 1 | 86862179 | 0.49595 | 1 | 1.01E−14 | 67 |
| rs343860 | 3 | 86863360 | 1 | 1 | 1.48E−32 | 68 |
| rs13108523 | 4 | 86867448 | 0.348199 | 1 | 1.20E−10 | 69 |
| rs1482094 | 3 | 86869043 | 1 | 1 | 1.48E−32 | 70 |
| rs7676486 | 2 | 86869655 | 0.348199 | 1 | 1.20E−10 | 71 |
| rs7660702 | 4 | 86870488 | 1 | 1 | | 72 |
| rs2062098 | 3 | 86871272 | 0.783784 | 1 | 6.93E−22 | 73 |
| rs1482091 | 2 | 86872385 | 0.239669 | 1 | 1.01E−07 | 74 |
| rs6813860 | 2 | 86874152 | 0.348199 | 1 | 1.20E−10 | 75 |
| rs994285 | 2 | 86878138 | 1 | 1 | 2.75E−31 | 76 |
| rs343853 | 1 | 86880195 | 0.213759 | 1 | 5.01E−07 | 77 |
| rs343849 | 1 | 86882079 | 1 | 1 | 2.05E−32 | 78 |
| rs3889735 | 4 | 86882860 | 0.348199 | 1 | 1.20E−10 | 79 |
| rs2601855 | 4 | 86883964 | 1 | 1 | 1.48E−32 | 80 |
| rs2601857 | 4 | 86884123 | 0.213759 | 1 | 5.01E−07 | 81 |
| rs7682971 | 4 | 86884320 | 0.239669 | 1 | 1.01E−07 | 82 |
| rs10516755 | 3 | 86885065 | 1 | 1 | 1.48E−32 | 83 |
| rs1020584 | 1 | 86888074 | 0.455202 | 1 | 2.47E−12 | 84 |
| rs13106553 | 3 | 86888786 | 0.348199 | 1 | 1.20E−10 | 85 |
| rs12510813 | 1 | 86892745 | 0.625117 | 1 | 1.90E−18 | 86 |
| rs12507272 | 4 | 86892912 | 0.625117 | 1 | 2.36E−18 | 87 |
| rs13137008 | 4 | 86893223 | 1 | 1 | 1.48E−32 | 88 |
| rs13112493 | 1 | 86895103 | 0.49595 | 1 | 2.44E−14 | 89 |
| rs4693735 | 4 | 86896131 | 0.348199 | 1 | 1.20E−10 | 90 |
| rs12507198 | 3 | 86901712 | 0.348199 | 1 | 1.75E−10 | 91 |
| rs13111662 | 4 | 86902145 | 1 | 1 | 5.28E−31 | 92 |
| rs11732231 | 2 | 86902584 | 0.810964 | 1 | 5.18E−25 | 93 |
| rs11736641 | 3 | 86902753 | 1 | 1 | 2.05E−32 | 94 |
| rs11097071 | 1 | 86904360 | 0.360568 | 1 | 7.62E−11 | 95 |
| rs7674888 | 3 | 86904770 | 0.49595 | 1 | 1.01E−14 | 96 |
| rs1966862 | 1 | 86907085 | 0.348199 | 1 | 1.20E−10 | 97 |
| rs12054628 | 4 | 86907793 | 0.49595 | 1 | 1.01E−14 | 98 |
| rs17010839 | 4 | 86910281 | 0.247863 | 1 | 9.07E−08 | 99 |
| rs11945319 | 3 | 86910619 | 0.34607 | 1 | 5.44E−10 | 100 |
| rs6831420 | 3 | 86911689 | 0.468186 | 1 | 2.37E−13 | 101 |
| rs7680588 | 2 | 86912777 | 0.49595 | 1 | 1.01E−14 | 102 |
| rs17010851 | 1 | 86914746 | 0.348199 | 1 | 1.36E−10 | 103 |
| rs17010857 | 3 | 86915002 | 0.348199 | 1 | 1.20E−10 | 104 |
| rs4693736 | 3 | 86915344 | 0.295644 | 1 | 6.85E−09 | 105 |
| rs13105921 | 1 | 86918750 | 1 | 1 | 1.48E−32 | 106 |
| rs17010887 | 2 | 86920745 | 0.213759 | 1 | 5.43E−07 | 107 |
| rs17010892 | 2 | 86920909 | 0.213759 | 1 | 5.43E−07 | 108 |
| rs17395020 | 4 | 86921136 | 0.261778 | 1 | 5.24E−11 | 109 |
| rs17399123 | 4 | 86921194 | 0.270936 | 1 | 4.77E−11 | 110 |
| rs10516756 | 4 | 86923000 | 0.213759 | 1 | 5.01E−07 | 111 |
| rs1452681 | 4 | 86924688 | 0.270936 | 1 | 2.75E−11 | 112 |
| rs9790823 | 2 | 86927744 | 0.217904 | 1 | 6.85E−07 | 113 |
| rs7683733 | 2 | 86928771 | 0.220422 | 0.479314 | 3.56E−06 | 114 |
| rs7662174 | 4 | 86928923 | 0.220422 | 0.479314 | 3.56E−06 | 115 |
| rs7684607 | 1 | 86929302 | 0.225814 | 0.50849 | 2.51E−06 | 116 |
| rs13118915 | 2 | 86930744 | 0.220422 | 0.479314 | 3.56E−06 | 117 |
| rs17010925 | 4 | 86932148 | 0.39058 | 0.860672 | 1.62E−10 | 118 |
| rs12503243 | 4 | 86934428 | 0.213759 | 1 | 5.01E−07 | 119 |
| rs7675429 | 2 | 86940109 | 0.201953 | 0.871243 | 5.12E−06 | 120 |
| rs7689056 | 3 | 86942197 | 0.201953 | 0.871243 | 5.12E−06 | 121 |
| rs7693640 | 2 | 86942405 | 0.201953 | 0.871243 | 5.12E−06 | 122 |

The table includes, for each SNP, the correlating allele with allele T of rs7660702, position in NCBI build 36, and r², D′ and P-value for the test of correlation between the two markers.

TABLE 8
List of surrogate markers to rs1321311 on Chromosome
6 with R² >0.2 in the HapMap CEU dataset.

| Marker | Correlated | Pos in NCBI | | | | Seq ID |
|---|---|---|---|---|---|---|
| name | Allele | Build 36 | R² | D′ | P-value | NO: |
| rs6457931 | 3 | 36721790 | 0.543871 | 0.952077 | 3.77E−17 | 123 |
| rs12207916 | 2 | 36725630 | 0.787201 | 0.958333 | 3.45E−24 | 124 |
| rs1321313 | 1 | 36726799 | 0.959677 | 1 | 7.68E−31 | 125 |
| rs4713994 | 4 | 36729511 | 0.375 | 1 | 1.67E−14 | 126 |
| rs1321311 | 4 | 36730878 | 1 | 1 | | 127 |
| rs1321310 | 3 | 36731102 | 0.960784 | 1 | 2.28E−31 | 128 |
| rs4331968 | 4 | 36731221 | 0.960784 | 1 | 2.28E−31 | 129 |
| rs9470361 | 1 | 36731357 | 0.879061 | 0.958567 | 3.91E−26 | 130 |
| rs6930671 | 2 | 36733250 | 0.563404 | 0.952505 | 2.21E−17 | 131 |
| rs11969445 | 2 | 36733360 | 0.563404 | 0.952505 | 2.21E−17 | 132 |
| rs9470366 | 1 | 36733540 | 0.848485 | 1 | 1.26E−26 | 133 |
| rs6936993 | 2 | 36734300 | 0.584107 | 0.953211 | 6.15E−18 | 134 |
| rs9470367 | 3 | 36734910 | 0.337685 | 0.938491 | 3.55E−11 | 135 |
| rs7756236 | 3 | 36735031 | 0.922481 | 1 | 1.37E−29 | 136 |
| rs9462207 | 2 | 36735577 | 0.922481 | 1 | 1.37E−29 | 137 |
| rs9368950 | 4 | 36735850 | 0.337685 | 0.938491 | 3.55E−11 | 138 |
| rs9462208 | 2 | 36735868 | 0.563404 | 0.952505 | 2.21E−17 | 139 |
| rs9462209 | 3 | 36736020 | 0.558936 | 0.951008 | 1.86E−16 | 140 |
| rs9462210 | 1 | 36736931 | 0.920319 | 1 | 4.60E−29 | 141 |
| rs10807170 | 2 | 36737422 | 0.525322 | 0.906625 | 2.75E−16 | 142 |
| rs4713996 | 2 | 36737692 | 0.521913 | 0.906391 | 3.85E−16 | 143 |
| rs9394368 | 2 | 36738503 | 0.560693 | 0.908894 | 4.21E−17 | 144 |
| rs4713999 | 1 | 36741047 | 0.520598 | 0.905258 | 7.59E−16 | 145 |
| rs4711457 | 4 | 36741138 | 0.49595 | 0.901374 | 8.21E−15 | 146 |
| rs6930083 | 1 | 36742134 | 0.542469 | 0.907759 | 1.11E−16 | 147 |
| rs4714001 | 3 | 36746153 | 0.466434 | 0.89957 | 3.47E−14 | 148 |
| rs1321309 | 2 | 36746614 | 0.333627 | 0.83924 | 8.26E−11 | 149 |
| rs733590 | 2 | 36753181 | 0.547811 | 0.907176 | 2.26E−16 | 150 |
| rs2395655 | 3 | 36753674 | 0.549019 | 0.908175 | 5.67E−17 | 151 |
| rs3176352 | 3 | 36760317 | 0.222202 | 0.546647 | 2.35E−06 | 152 |
| rs12207548 | 4 | 36764234 | 0.26932 | 0.601822 | 1.00E−07 | 153 |
| rs12191972 | 2 | 36766720 | 0.289736 | 0.668157 | 6.01E−08 | 154 |
| rs7767246 | 3 | 36767193 | 0.312694 | 0.679409 | 8.45E−09 | 155 |
| rs6937605 | 4 | 36767910 | 0.363382 | 0.769281 | 4.12E−10 | 156 |
| rs7762245 | 1 | 36824207 | 0.201313 | 0.484629 | 6.59E−06 | 157 |

The table includes, for each SNP, the correlating allele with allele T of rs1321311, position in NCBI build 36, and r², D′ and P-value for the test of correlation between the two markers.

TABLE 9
List of surrogate markers to rs3807989 on Chromosome
7, with R² >0.2 in the HapMap CEU dataset.

| Marker | Correlated | Pos in NCBI | | | | Seq ID |
|---|---|---|---|---|---|---|
| Name | Allele | Build 36 | R² | D′ | P-value | NO: |
| rs2157799 | 4 | 115791226 | 0.253596 | 0.633413 | 1.50E−06 | 158 |
| rs721994 | 1 | 115805024 | 0.250393 | 0.685905 | 3.21E−06 | 159 |
| rs1728723 | 3 | 115805415 | 0.235497 | 0.671188 | 8.71E−06 | 160 |
| rs2049902 | 2 | 115816159 | 0.226304 | 0.566185 | 4.86E−06 | 161 |
| rs11772856 | 2 | 115822080 | 0.248563 | 0.604284 | 1.60E−06 | 162 |
| rs1858810 | 2 | 115846095 | 0.297303 | 0.546642 | 1.21E−06 | 163 |
| rs7781492 | 3 | 115857211 | 0.323984 | 0.570206 | 1.18E−07 | 164 |
| rs10464649 | 2 | 115860803 | 0.353195 | 0.605573 | 2.72E−09 | 165 |
| rs12706089 | 4 | 115871603 | 0.346706 | 0.588817 | 2.39E−09 | 166 |
| rs7782281 | 3 | 115874582 | 0.241009 | 0.823196 | 5.52E−06 | 167 |
| rs4727831 | 1 | 115881219 | 0.363424 | 0.611386 | 9.31E−10 | 168 |
| rs768108 | 4 | 115895894 | 0.346706 | 0.588817 | 2.39E−09 | 169 |
| rs717957 | 3 | 115900343 | 0.296077 | 0.611789 | 4.46E−08 | 170 |
| rs1883049 | 3 | 115905619 | 0.223085 | 1 | 7.03E−09 | 171 |
| rs6959099 | 1 | 115906716 | 0.223085 | 1 | 7.03E−09 | 172 |
| rs6975771 | 1 | 115910081 | 0.223085 | 1 | 7.03E−09 | 173 |
| rs6976316 | 3 | 115910179 | 0.296077 | 0.611789 | 4.46E−08 | 174 |
| rs6954077 | 3 | 115916389 | 0.305707 | 0.61506 | 4.44E−07 | 175 |
| rs728690 | 4 | 115919122 | 0.208646 | 1 | 2.09E−08 | 176 |
| rs10228178 | 3 | 115919447 | 0.294818 | 0.608492 | 3.88E−08 | 177 |
| rs2402081 | 2 | 115924531 | 0.213336 | 1 | 4.29E−08 | 178 |
| rs2270188 | 3 | 115927760 | 0.389009 | 0.749679 | 1.03E−10 | 179 |
| rs10271007 | 1 | 115933085 | 0.369378 | 0.729328 | 2.85E−09 | 180 |
| rs4730743 | 1 | 115933193 | 0.388598 | 0.742622 | 4.13E−10 | 181 |
| rs4727833 | 2 | 115935144 | 0.389009 | 0.749679 | 1.03E−10 | 182 |
| rs2109513 | 4 | 115937344 | 0.22815 | 1 | 5.39E−09 | 183 |
| rs6466579 | 4 | 115938391 | 0.389009 | 0.749679 | 1.03E−10 | 184 |
| rs3919515 | 3 | 115939020 | 0.385928 | 0.745217 | 1.73E−10 | 185 |
| rs975028 | 1 | 115944363 | 0.223085 | 1 | 7.03E−09 | 186 |
| rs2215448 | 1 | 115951188 | 0.203338 | 1 | 3.85E−08 | 187 |
| rs2742125 | 4 | 115952699 | 0.21142 | 1 | 2.31E−08 | 188 |
| rs3779512 | 4 | 115958299 | 0.242436 | 0.536345 | 3.53E−07 | 189 |
| rs9649394 | 1 | 115958746 | 0.221316 | 0.501891 | 1.42E−06 | 190 |
| rs1474510 | 1 | 115964693 | 0.223085 | 1 | 9.82E−09 | 191 |
| rs3807986 | 3 | 115965061 | 0.388538 | 0.939359 | 5.00E−11 | 192 |
| rs6466584 | 3 | 115967192 | 0.223085 | 1 | 7.03E−09 | 193 |
| rs6466585 | 3 | 115967220 | 0.223085 | 1 | 7.03E−09 | 194 |
| rs1476833 | 4 | 115968711 | 0.223085 | 1 | 8.31E−09 | 195 |
| rs976739 | 1 | 115971767 | 0.237811 | 1 | 2.32E−09 | 196 |
| rs3807989 | 1 | 115973477 | 1 | 1 | | 197 |
| rs3801995 | 4 | 115977833 | 0.43423 | 0.944245 | 7.89E−13 | 198 |
| rs3815412 | 2 | 115977929 | 0.499781 | 1 | 8.27E−18 | 199 |
| rs11773845 | 2 | 115978537 | 1 | 1 | 1.05E−37 | 200 |
| rs9886215 | 3 | 115978887 | 0.290501 | 1 | 5.25E−11 | 201 |
| rs9886219 | 4 | 115979104 | 0.283789 | 1 | 7.44E−11 | 202 |
| rs2109516 | 3 | 115979305 | 0.259675 | 0.912736 | 1.05E−07 | 203 |
| rs3757732 | 1 | 115980941 | 0.445619 | 0.943658 | 5.07E−13 | 204 |
| rs3757733 | 1 | 115980965 | 0.495249 | 1 | 1.61E−17 | 205 |
| rs7804372 | 1 | 115981464 | 0.499781 | 1 | 8.27E−18 | 206 |
| rs729949 | 1 | 115982141 | 0.499781 | 1 | 8.27E−18 | 207 |
| rs3807990 | 4 | 115983999 | 0.499781 | 1 | 8.27E−18 | 208 |
| rs3807992 | 1 | 115984481 | 0.499781 | 1 | 8.27E−18 | 209 |
| rs3807994 | 1 | 115984815 | 0.499781 | 1 | 8.27E−18 | 210 |
| rs6466587 | 3 | 115985237 | 0.283789 | 1 | 7.44E−11 | 211 |
| rs6466588 | 4 | 115985326 | 0.499781 | 1 | 8.27E−18 | 212 |
| rs1049314 | 1 | 115986931 | 0.283789 | 1 | 9.15E−11 | 213 |
| rs8713 | 2 | 115987033 | 0.283789 | 1 | 7.44E−11 | 214 |
| rs6867 | 1 | 115987759 | 0.283789 | 1 | 7.44E−11 | 215 |
| rs1049337 | 2 | 115987823 | 0.263682 | 1 | 6.03E−11 | 216 |
| rs6961215 | 4 | 115989766 | 0.283789 | 1 | 7.44E−11 | 217 |
| rs6961388 | 3 | 115989973 | 0.283789 | 1 | 9.15E−11 | 218 |
| rs10280730 | 4 | 115990409 | 0.283789 | 1 | 7.44E−11 | 219 |
| rs10232369 | 1 | 115990559 | 0.283789 | 1 | 7.44E−11 | 220 |
| rs6959106 | 2 | 115991294 | 0.237811 | 1 | 2.32E−09 | 221 |
| rs7802124 | 2 | 115993150 | 0.237811 | 1 | 2.32E−09 | 222 |
| rs7802438 | 1 | 115993436 | 0.237811 | 1 | 2.32E−09 | 223 |
| rs1860588 | 2 | 115993722 | 0.223085 | 1 | 7.03E−09 | 224 |
| rs2052106 | 1 | 115993901 | 0.585826 | 1 | 1.27E−20 | 225 |
| rs11979486 | 3 | 115994130 | 0.216124 | 1 | 2.15E−08 | 226 |
| rs10273326 | 2 | 115996769 | 0.237811 | 1 | 2.32E−09 | 227 |
| rs6466589 | 3 | 115999209 | 0.334457 | 0.932019 | 7.80E−10 | 228 |
| rs7795356 | 4 | 116004265 | 0.299863 | 0.926059 | 6.90E−09 | 229 |
| rs2109517 | 3 | 116004893 | 0.503765 | 0.947548 | 2.52E−14 | 230 |
| rs2056865 | 3 | 116007768 | 0.521994 | 0.908758 | 1.70E−15 | 231 |
| rs2191503 | 4 | 116009428 | 0.299863 | 0.926059 | 6.90E−09 | 232 |
| rs4727835 | 1 | 116011385 | 0.268267 | 0.915579 | 3.98E−07 | 233 |
| rs7800573 | 3 | 116011874 | 0.305266 | 0.870485 | 8.55E−09 | 234 |
| rs6955302 | 4 | 116012940 | 0.430781 | 0.882852 | 4.22E−11 | 235 |
| rs6978354 | 3 | 116013658 | 0.293672 | 0.736242 | 2.13E−08 | 236 |

The table includes, for each SNP, the correlating allele with allele A of rs3807989, position in NCBI build 36, and r², D′ and P-value for the test of correlation between the two markers.

TABLE 10
List of surrogate markers to rs1733724 on Chromosome
10, with R² >0.2 in the HapMap CEU dataset.

| Marker | Correlated | Pos in NCBI | | | | Seq ID |
|---|---|---|---|---|---|---|
| Name | Allele | Build 36 | R² | D′ | P-value | NO: |
| rs1149782 | 4 | 53808502 | 0.214229 | 0.790176 | 4.09E−07 | 237 |
| rs1149781 | 4 | 53809582 | 0.273357 | 0.807508 | 2.06E−08 | 238 |
| rs1194673 | 2 | 53811658 | 0.234785 | 0.614501 | 6.96E−07 | 239 |
| rs1149776 | 4 | 53812481 | 0.218988 | 0.597389 | 2.74E−06 | 240 |
| rs1149775 | 3 | 53812501 | 0.210797 | 0.782266 | 8.10E−07 | 241 |
| rs1149772 | 4 | 53815310 | 0.23734 | 0.615503 | 5.87E−07 | 242 |
| rs1149769 | 3 | 53816103 | 0.239771 | 0.626724 | 1.50E−06 | 243 |
| rs1194671 | 3 | 53817795 | 0.23734 | 0.615503 | 5.87E−07 | 244 |
| rs1194670 | 4 | 53818050 | 0.23388 | 0.611 | 1.11E−06 | 245 |
| rs1194669 | 4 | 53818295 | 0.214229 | 0.790176 | 4.09E−07 | 246 |
| rs1194668 | 2 | 53818632 | 0.224627 | 0.610352 | 1.14E−06 | 247 |
| rs6480837 | 1 | 53819249 | 0.22959 | 0.612413 | 9.83E−07 | 248 |
| rs1209265 | 3 | 53819777 | 0.214229 | 0.790176 | 4.09E−07 | 249 |
| rs1194664 | 3 | 53820821 | 0.23734 | 0.615503 | 5.87E−07 | 250 |
| rs1194663 | 2 | 53821101 | 0.214229 | 0.790176 | 4.09E−07 | 251 |
| rs1660760 | 4 | 53824626 | 0.214229 | 0.790176 | 4.09E−07 | 252 |
| rs12355839 | 2 | 53877702 | 0.290323 | 1 | 1.62E−11 | 253 |
| rs1194743 | 1 | 53882603 | 0.95092 | 1 | 1.37E−26 | 254 |
| rs1733724 | 4 | 53893983 | 1 | 1 | | 255 |

The table includes, for each SNP, the correlating allele with allele T of rs1733724, position in NCBI build 36, and r², D′ and P-value for the test of correlation between the two markers.

TABLE 11
List of surrogate markers to rs3825214 on Chromosome
12, with R² >0.2 in the HapMap CEU dataset.

| Marker | Correlated | Pos in NCBI | | | | Seq ID |
|---|---|---|---|---|---|---|
| Name | Allele | Build 36 | R² | D′ | P-value | NO: |
| rs6489952 | 3 | 113243156 | 0.583962 | 0.923097 | 3.70E−13 | 256 |
| rs1895593 | 2 | 113245198 | 0.786096 | 1 | 3.86E−19 | 257 |
| rs7966567 | 2 | 113245863 | 0.786096 | 1 | 2.78E−19 | 258 |
| rs8181608 | 1 | 113245966 | 0.786096 | 1 | 2.78E−19 | 259 |
| rs10744818 | 4 | 113246068 | 0.786096 | 1 | 2.78E−19 | 260 |
| rs8181683 | 2 | 113246101 | 0.786096 | 1 | 2.78E−19 | 261 |
| rs8181627 | 4 | 113246147 | 0.786096 | 1 | 2.78E−19 | 262 |
| rs10744819 | 1 | 113246213 | 0.786096 | 1 | 3.86E−19 | 263 |
| rs6489953 | 2 | 113249145 | 0.837984 | 1 | 9.19E−21 | 264 |
| rs10744820 | 1 | 113252510 | 0.786096 | 1 | 3.28E−19 | 265 |
| rs1895587 | 1 | 113253912 | 0.786096 | 1 | 2.78E−19 | 266 |
| rs9669457 | 1 | 113260665 | 0.449812 | 0.762707 | 5.75E−11 | 267 |
| rs6489955 | 3 | 113269662 | 0.786096 | 1 | 2.78E−19 | 268 |
| rs7309910 | 2 | 113270637 | 0.786096 | 1 | 2.78E−19 | 269 |
| rs7308120 | 4 | 113273429 | 0.78955 | 0.888566 | 7.45E−19 | 270 |
| rs2384409 | 1 | 113273861 | 0.78955 | 0.888566 | 7.45E−19 | 271 |
| rs2891503 | 1 | 113274193 | 0.653082 | 0.830546 | 1.54E−15 | 272 |
| rs7977083 | 1 | 113274883 | 0.705085 | 0.88612 | 4.59E−17 | 273 |
| rs1895597 | 1 | 113275267 | 0.897959 | 1 | 1.14E−23 | 274 |
| rs7316919 | 1 | 113275838 | 0.745481 | 0.887356 | 6.79E−18 | 275 |
| rs6489956 | 4 | 113276619 | 0.789135 | 0.888333 | 3.02E−18 | 276 |
| rs883079 | 3 | 113277623 | 0.673469 | 1 | 4.72E−19 | 277 |
| rs2113433 | 1 | 113278440 | 0.78955 | 0.888566 | 7.45E−19 | 278 |
| rs3825214 | 3 | 113279826 | 1 | 1 | | 279 |
| rs12367410 | 4 | 113281071 | 1 | 1 | 2.10E−24 | 280 |
| rs10507248 | 3 | 113281476 | 0.737609 | 1 | 2.64E−20 | 281 |
| rs7955405 | 1 | 113281689 | 0.729997 | 1 | 5.76E−19 | 282 |
| rs10744823 | 2 | 113282465 | 1 | 1 | 1.10E−26 | 283 |
| rs7312625 | 3 | 113284357 | 0.737609 | 1 | 2.64E−20 | 284 |
| rs4767237 | 1 | 113285196 | 0.678528 | 0.938483 | 3.21E−16 | 285 |
| rs7135659 | 3 | 113286155 | 0.619607 | 0.87392 | 1.02E−13 | 286 |
| rs1895585 | 4 | 113286521 | 0.633616 | 0.883563 | 1.16E−15 | 287 |
| rs1946295 | 4 | 113286744 | 0.633616 | 0.883563 | 1.16E−15 | 288 |
| rs1946293 | 2 | 113287143 | 0.682713 | 0.938566 | 2.20E−16 | 289 |
| rs3825215 | 3 | 113289281 | 0.624683 | 0.877949 | 7.18E−15 | 290 |
| rs1895582 | 2 | 113291418 | 0.633616 | 0.883563 | 1.16E−15 | 291 |
| rs7964303 | 4 | 113298669 | 0.631578 | 0.883482 | 1.40E−15 | 292 |
| rs17731569 | 3 | 113312090 | 0.384817 | 0.644375 | 4.22E−09 | 293 |

The table includes, for each SNP, the correlating allele with allele G of rs3825214, position in NCBI build 36, and r², D′ and P-value for the test of correlation between the two markers.

TABLE 12
List of surrogate markers to rs365990 on Chromosome
14, with R² >0.2 in the HapMap CEU dataset.

| Marker | Correlated | Pos in NCBI | | | | Seq ID |
|---|---|---|---|---|---|---|
| Name | Allele | Build 36 | R2 | D′ | P-value | NO: |
| rs3811178 | 4 | 22915084 | 0.265259 | 0.576202 | 6.24E−07 | 294 |
| rs8022522 | 1 | 22927191 | 0.356 | 0.702714 | 1.30E−09 | 295 |
| rs365990 | 3 | 22931651 | 1 | 1 | | 296 |
| rs445754 | 4 | 22933642 | 0.6 | 1 | 6.92E−19 | 297 |
| rs10149522 | 2 | 22934361 | 0.201835 | 1 | 2.67E−07 | 298 |
| rs452036 | 1 | 22935725 | 0.962963 | 1 | 1.45E−32 | 299 |
| rs412768 | 2 | 22936553 | 0.823529 | 1 | 9.01E−27 | 300 |
| rs439735 | 1 | 22938125 | 0.572447 | 0.947708 | 1.00E−16 | 301 |
| rs388914 | 4 | 22942932 | 0.572447 | 0.947708 | 1.00E−16 | 302 |
| rs440466 | 2 | 22943957 | 0.853694 | 0.924846 | 8.41E−26 | 303 |
| rs2277474 | 4 | 22944363 | 0.530018 | 0.897793 | 5.13E−15 | 304 |
| rs7143356 | 2 | 22950923 | 0.718976 | 0.849564 | 4.79E−21 | 305 |
| rs12147570 | 4 | 22951760 | 0.340672 | 0.922866 | 3.61E−10 | 306 |
| rs2284651 | 3 | 22951984 | 0.718588 | 0.849337 | 9.60E−21 | 307 |
| rs7149517 | 3 | 22952026 | 0.720551 | 0.849665 | 3.35E−21 | 308 |
| rs2331979 | 3 | 22952695 | 0.720551 | 0.849665 | 3.35E−21 | 309 |
| rs3729833 | 1 | 22953024 | 0.340234 | 0.921912 | 4.29E−10 | 310 |
| rs765021 | 1 | 22953439 | 0.722119 | 0.849776 | 1.55E−21 | 311 |
| rs7140721 | 1 | 22955534 | 0.722119 | 0.849776 | 1.55E−21 | 312 |
| rs3729829 | 4 | 22955727 | 0.722119 | 0.849776 | 1.55E−21 | 313 |
| rs3729828 | 4 | 22955837 | 0.716937 | 0.849216 | 2.08E−20 | 314 |
| rs3729825 | 1 | 22956104 | 0.340672 | 0.922866 | 3.61E−10 | 315 |
| rs7159367 | 2 | 22957485 | 0.722119 | 0.849776 | 1.55E−21 | 316 |
| rs12894524 | 4 | 22957880 | 0.722119 | 0.849776 | 1.55E−21 | 317 |
| rs2277475 | 4 | 22958505 | 0.722119 | 0.849776 | 1.55E−21 | 318 |
| rs12147533 | 3 | 22960531 | 0.340672 | 0.922866 | 3.61E−10 | 319 |
| rs743567 | 2 | 22960822 | 0.688975 | 0.845857 | 2.57E−20 | 320 |
| rs7157716 | 3 | 22962728 | 0.588928 | 0.826317 | 3.05E−16 | 321 |
| rs2754163 | 2 | 22967347 | 0.594419 | 0.83276 | 4.20E−17 | 322 |

The table includes, for each SNP, the correlating allele with allele G of rs365990, position in NCBI build 36, and r², D′ and P-value for the test of correlation between the two markers.

### REFERENCES

[0359] 1. Palatini, P. & Julius, S. Elevated heart rate: a major risk factor for cardiovascular disease. Clin Exp Hypertens 26, 637-44 (2004).
[0360] 2. Bjornsson, S., Thorgeirsson, G. et al. Samband hjartslattartidni, heilsufarsthatta, reyking a og danarmeina. Laeknabladid, 21-7 (1993).
[0361] 3. Jouven, X. et al. Heart-rate profile during exercise as a predictor of sudden death. N Engl J Med 352, 1951-8 (2005).
[0362] 4. Saksena, S., Camm J. A. Electrophysiological Disorders of the Heart, (Elsevier Churchill Livingstone, Philadelphia, 2004).
[0363] 5. Cheng, S. et al. Long-term outcomes in individuals with prolonged PR interval or first-degree atrioventricular block. Jama 301, 2571-7 (2009).
[0364] 6. Hesse, B., Diaz, L. A., Snader, C. E., Blackstone, E. H. & Lauer, M. S. Complete bundle branch block as an independent predictor of all-cause mortality: report of 7,073 patients referred for nuclear exercise testing. Am J Med 110, 253-9 (2001).
[0365] 7. Desai, A. D. et al. Prognostic Significance of Quantitative QRS Duration. Am J Med 119, 600-6 (2006).
[0366] 8. Newton-Cheh, C. et al. Genome-wide association study of electrocardiographic and heart rate variability traits: the Framingham Heart Study. BMC Med Genet. 8 Suppl 1, S7 (2007).
[0367] 9. Hanson, B. et al. Genetic factors in the electrocardiogram and heart rate of twins reared apart and together. Am J Cardiol 63, 606-9 (1989).
[0368] 10. Havlik, R. J., Garrison, R. J., Fabsitz, R. & Feinleib, M. Variability of heart rate, P-R, QRS and Q-T durations in twins. J Electrocardiol 13, 45-8 (1980).
[0369] 11. Russell, M. W., Law, I., Sholinsky, P. & Fabsitz, R. R. Heritability of ECG measurements in adult male twins. J Electrocardiol 30 Suppl, 64-8 (1998).
[0370] 12. Li, J. et al. Familial aggregation and heritability of electrocardiographic intervals and heart rate in a rural Chinese population. Ann Noninvasive Electrocardiol 14, 147-52 (2009).
[0371] 13. Mutikainen, S. et al. Genetic influences on resting electrocardiographic variables in older women: a twin study. Ann Noninvasive Electrocardiol 14, 57-64 (2009).
[0372] 14. Arking, D. E. et al. A common genetic variant in the NOS1 regulator NOS1AP modulates cardiac repolarization. Nat Genet. 38, 644-51 (2006).
[0373] 15. Kao, W. H. et al. Genetic variations in nitric oxide synthase 1 adaptor protein are associated with sudden cardiac death in US white community-based populations. Circulation 119, 940-51 (2009).
[0374] 16. Newton-Cheh, C. et al. Common variants at ten loci influence QT interval duration in the QTGEN Study. Nat Genet. 41, 399-406 (2009).
[0375] 17. Pfeufer, A. et al. Common variants at ten loci modulate the QT interval duration in the QTSCD Study. Nat. Genet. 41, 407-14 (2009).
[0376] 18. Cho, Y. S. et al. A large-scale genome-wide association study of Asian populations uncovers genetic factors influencing eight quantitative traits. Nat Genet. 41, 527-34 (2009).
[0377] 19. Smith, J. G. et al. Genome-wide association study of electrocardiographic conduction measures in an isolated founder population: Kosrae. Heart Rhythm 6, 634-41 (2009).
[0378] 20. Li, Q. Y. et al. Holt-Oram syndrome is caused by mutations in TBX5, a member of the Brachyury (T) gene family. Nat Genet. 15, 21-9 (1997).
[0379] 21. Basson, C. T. et al. Mutations in human TBX5 [corrected] cause limb and cardiac malformation in Holt-Oram syndrome. Nat Genet. 15, 30-5 (1997).
[0380] 22. Basson, C. T. et al. The clinical and genetic spectrum of the Holt-Oram syndrome (heart-hand syndrome). N Engl J Med 330, 885-91 (1994).
[0381] 23. Moskowitz, I. P. et al. The T-Box transcription factor TbxS is required for the patterning and maturation of the murine cardiac conduction system. Development 131, 4107-16 (2004).
[0382] 24. Bruneau, B. G. et al. A murine model of Holt-Oram syndrome defines roles of the T-box transcription factor Tbx5 in cardiogenesis and disease. Cell 106, 709-21 (2001).
[0383] 25. Ghosh, T. K. et al. Physical interaction between TBX5 and MEF2C is required for early heart development. Mol Cell Biol 29, 2205-18 (2009).
[0384] 26. Levy, D. et al. Genome-wide association study of blood pressure and hypertension. Nat Genet (2009).
[0385] 27. Rabert, D. K. et al. A tetrodotoxin-resistant voltage-gated sodium channel from human dorsal root ganglia, hPN3/SCN10A. Pain 78, 107-14 (1998).
[0386] 28. Sangameswaran, L. et al. Structure and function of a novel voltage-gated, tetrodotoxin-resistant sodium channel specific to sensory neurons. J Biol Chem 271, 5953-6 (1996).
[0387] 29. Ruan, Y., Liu, N. & Priori, S. G. Sodium channel mutations and arrhythmias. Nat Rev Cardiol 6, 337-48 (2009).
[0388] 30. Katoh, M. & Katoh, M. Identification and characterization of ARHGAP24 and ARHGAP25 genes in silico. Int J Mol Med 14, 333-8 (2004).
[0389] 31. Moon, S. Y. & Zheng, Y. Rho GTPase-activating proteins in cell regulation. Trends Cell Biol 13, 13-22 (2003).
[0390] 32. Kandpal, R. P. Rho GTPase activating proteins in cancer phenotypes. Curr Protein Pept Sci 7, 355-65 (2006).
[0391] 33. Su, Z. J. et al. A vascular cell-restricted RhoGAP, p73RhoGAP, is a key regulator of angiogenesis. Proc Natl Acad Sci USA 101, 12212-7 (2004).
[0392] 34. Engelman, J. A. et al. Molecular genetics of the caveolin gene family: implications for human cancers, diabetes, Alzheimer disease, and muscular dystrophy. Am J Hum Genet. 63, 1578-87 (1998).
[0393] 35. Kurzchalia, T. V. & Parton, R. G. Membrane microdomains and caveolae. Curr Opin Cell Biol 11, 424-31 (1999).
[0394] 36. Razani, B. et al. Caveolin-1 null mice are viable but show evidence of hyperproliferative and vascular abnormalities. J Biol Chem 276, 38121-38 (2001).
[0395] 37. Drab, M. et al. Loss of caveolae, vascular dysfunction, and pulmonary defects in caveolin-1 gene-disrupted mice. Science 293, 2449-52 (2001).
[0396] 38. Zhao, Y. Y. et al. Defects in caveolin-1 cause dilated cardiomyopathy and pulmonary hypertension in knockout mice. Proc Natl Acad Sci USA 99, 11375-80 (2002).
[0397] 39. Zakut, R. & Givol, D. The tumor suppression function of p21Waf is contained in its N-terminal half (‘half-WAF’). Oncogene 11, 393-5 (1995).
[0398] 40. Kurabayashi, M., Tsuchimochi, H., Komuro, I., Takaku, F. & Yazaki, Y. Molecular cloning and characterization of human cardiac alpha- and beta-form myosin heavy chain complementary DNA clones. Regulation of expression during development and pressure overload in human atrium. J Clin Invest 82, 524-31 (1988).
[0399] 41. Mandavi, V., Chambers, A. P. & Nadal-Ginard, B. Cardiac alpha- and beta-myosin heavy chain genes are organized in tandem. Proc Natl Acad Sci USA 81, 2626-30 (1984).
[0400] 42. Franco, D., Lamers, W. H. & Moorman, A. F. Patterns of expression in the developing myocardium: towards a morphologically integrated transcriptional model. Cardiovasc Res 38, 25-53 (1998).
[0401] 43. Lompre, A. M., Nadal-Ginard, B. & Mandavi, V. Expression of the cardiac ventricular alpha- and beta-myosin heavy chain genes is developmentally and hormonally regulated. J Biol Chem 259, 6437-46 (1984).
[0402] 44. Litten, R. Z., 3rd, Martin, B. J., Low, R. B. & Alpert, N. R. Altered myosin isozyme patterns from pressure-overloaded and thyrotoxic hypertrophied rabbit hearts. Circ Res 50, 856-64 (1982).
[0403] 45. Harris, D. E., Work, S. S., Wright, R. K., Alpert, N. R. & Warshaw, D. M. Smooth, cardiac and skeletal muscle myosin force and motion generation assessed by cross-bridge mechanical interactions in vitro. J Muscle Res Cell Motil 15, 11-9 (1994).
[0404] 46. Herron, T. J., Korte, F. S. & McDonald, K. S. Loaded shortening and power output in cardiac myocytes are dependent on myosin heavy chain isoform expression. Am J Physiol Heart Circ Physiol 281, H1217-22 (2001).
[0405] 47. Herron, T. J. & McDonald, K. S. Small amounts of alpha-myosin heavy chain isoform expression significantly increase power output of rat cardiac myocyte fragments. Circ Res 90, 1150-2 (2002).
[0406] 48. Carniel, E. et al. Alpha-myosin heavy chain: a sarcomeric gene associated with dilated and hypertrophic phenotypes of cardiomyopathy. Circulation 112, 54-9 (2005).
[0407] 49. Ching, Y. H. et al. Mutation in myosin heavy chain 6 causes atrial septal defect. Nat Genet. 37, 423-8 (2005).
[0408] 50. A haplotype map of the human genome. Nature 437, 1299-320 (2005).
[0409] 51. Kong, A. et al. Detection of sharing by descent, long-range phasing and haplotype imputation. Nat Genet (2008).
[0410] 52. Maier, S. K. et al. Distinct subcellular localization of different sodium channel alpha and beta subunits in single ventricular myocytes from mouse heart. Circulation 109, 1421-7 (2004).
[0411] 53. Brodsky, M., Wu, D., Denes, P. & Rosen, K. M. Familial atrial tachyarrhythmia with short PR interval. Arch Intern Med 137, 165-9 (1977).
[0412] 54. Lown, B., Ganong, W. F. & Levine, S. A. The syndrome of short P-R interval, normal QRS complex and paroxysmal rapid heart action. Circulation 5, 693-706 (1952).
[0413] 55. Postma, A. V. et al. A gain-of-function TBX5 mutation is associated with atypical Holt-Oram syndrome and paroxysmal atrial fibrillation. Circ Res 102, 1433-42 (2008).
[0414] 56. Thorgeirsson, T. E. et al. A variant associated with nicotine dependence, lung cancer and peripheral arterial disease. Nature 452, 638-42 (2008).
[0415] 57. Gudbjartsson, D. F. et al. Sequence variants affecting eosinophil numbers associate with asthma and myocardial infarction. Nat Genet. 41, 342-7 (2009).
[0416] 58. Willer, C. J. et al. Newly identified loci that influence lipid concentrations and risk of coronary artery disease. Nat Genet. 40, 161-9 (2008).
[0417] 59. Gouas, L. et al. Association of KCNQ1, KCNE1, KCNH2 and SCN5A polymorphisms with QTc interval length in a healthy population. Eur J Hum Genet. 13, 1213-22 (2005).
[0418] 60. Newton-Cheh, C. et al. Common genetic variation in KCNH2 is associated with QT interval duration: the Framingham Heart Study. Circulation 116, 1128-36 (2007).
[0419] 61. Pfeufer, A. et al. Common variants in myocardial ion channel genes modify the QT interval in the general population: results from the KORA study. Circ Res 96, 693-701 (2005).
[0420] 62. Friedlander, Y. et al. Possible association of the human KCNE1 (minK) gene and QT interval in healthy subjects: evidence from association and linkage analyses in Israeli families. Ann Hum Genet. 69, 645-56 (2005).
[0421] 63. Akyol, M. et al. The common non-synonymous variant G38S of the KCNE1-(minK)-gene is not associated to QT interval in Central European Caucasians: results from the KORA study. Eur Heart J 28, 305-9 (2007).
[0422] 64. Zhou, S. H., Helfenbein, E. D., Lindauer, J. M., Gregg, R. E. & Feild, D. Q. Philips QT interval measurement algorithms for diagnostic, ambulatory, and patient monitoring ECG applications. Ann Noninvasive Electrocardiol 14 Suppl 1, S3-8 (2009).
[0423] 65. James Lindauer, R. G., Eric Helfenbein, Min Shao, Sophia Zhou. Global QT measurements in the Philips 12-lead algorithm. Journal of Electrocardiology, 90 (2005).
[0424] 66. Devlin, B., Bacanu, S. A. & Roeder, K. Genomic Control to the extreme. Nat Genet. 36, 1129-30; author reply 1131 (2004).
[0425] 67. Marchini, J., Howie, B., Myers, S., McVean, G. & Donnelly, P. A new multipoint method for genome-wide association studies by imputation of genotypes. Nat Genet. 39, 906-13 (2007).
[0426] 68. Gretarsdottir, S. et al. The gene encoding phosphodiesterase 4D confers risk of ischemic stroke. Nat Genet. 35, 131-8 (2003).

### Example 2

[0427] Association of further markers in regions identified as harboring variants associated with ECG measures and related phenotypes was performed.

[0428] Data for SNPs was imputed based on whole genome sequencing of 84 Icelanders using the IMPUTE model (Marchini, 3., Howie, B., Myers, S., McVean, G. & Donnelly, P. A new multipoint method for genome-wide association studies by imputation of genotypes. Nat Genet. 39, 906-13 (2007)), using long range phasing (Kong, A., et al. Nat Genet. 40:1068-75 (2008)). Quantitative traits were regressed on expected allele counts using classical linear regression. Disease phenotypes were analyzed using logistic regression where affection status was treated as the response variable and the expected genotype as a explanatory variable.

[0429] The results below show that large number of variants in the identified regions are indeed associating with ECG phenotypes, atrial fibrillation and pacemaker placement. This is to be expected, due to the extensive LD in the respective regions.

TABLE 13
Association results for QRS interval in a 2 Mb
region flanking rs3825214 on chromosome 12.

| | | | | | effect | other | SEQ ID |
|---|---|---|---|---|---|---|---|
| marker | p-value | effect | freq | position | allele | allele | NO: |
| rs1895597 | 1.96E−08 | −0.073865 | 0.769214 | 113,275,267 | A | T | 274 |
| rs2891503 | 2.31E−08 | 0.074026 | 0.238778 | 113,274,193 | A | G | 272 |
| rs3825214 | 2.78E−08 | −0.073117 | 0.781334 | 113,279,826 | A | G | 279 |
| rs10744823 | 2.80E−08 | 0.074731 | 0.216396 | 113,282,465 | C | T | 283 |
| rs12367410 | 2.85E−08 | −0.073818 | 0.783762 | 113,281,071 | C | T | 280 |
| rs2113433 | 3.95E−08 | −0.072419 | 0.777774 | 113,278,440 | G | T | 278 |
| rs6489956 | 4.01E−08 | −0.07261 | 0.778493 | 113,276,619 | C | T | 276 |
| rs7316919 | 4.05E−08 | 0.072705 | 0.221127 | 113,275,838 | A | C | 275 |
| rs2384409 | 4.31E−08 | 0.073008 | 0.219567 | 113,273,861 | A | G | 271 |
| rs2384408 | 4.64E−08 | 0.073329 | 0.215815 | 113,273,733 | A | G | 3353 |
| rs7308120 | 4.69E−08 | −0.073366 | 0.784397 | 113,273,429 | C | T | 270 |
| rs7977083 | 1.24E−07 | 0.067698 | 0.25662 | 113,274,883 | A | G | 273 |
| rs1862909 | 1.51E−07 | 0.072489 | 0.200957 | 113,271,488 | A | G | 3354 |
| rs7309910 | 1.68E−07 | 0.072367 | 0.200136 | 113,270,637 | C | G | 269 |
| rs6489955 | 2.11E−07 | −0.071974 | 0.801216 | 113,269,662 | A | G | 268 |
| rs10744822 | 2.14E−07 | 0.072105 | 0.198608 | 113,268,423 | C | T | 3355 |
| rs10744824 | 2.64E−07 | −0.070628 | 0.799931 | 113,293,021 | A | G | 3356 |
| rs5015007 | 3.48E−07 | −0.070731 | 0.804004 | 113,289,466 | A | T | 3357 |
| rs7965033 | 5.06E−07 | −0.070557 | 0.808474 | 113,295,738 | C | T | 3358 |
| rs933748 | 1.39E−06 | 0.066658 | 0.205406 | 113,245,039 | C | T | 3359 |
| rs6489953 | 1.84E−06 | 0.066445 | 0.188781 | 113,249,145 | C | T | 264 |
| rs10774752 | 1.91E−06 | 0.066336 | 0.188509 | 113,252,695 | A | G | 3360 |
| rs7964836 | 1.93E−06 | −0.066304 | 0.811491 | 113,251,103 | C | G | 3361 |
| rs7307520 | 1.98E−06 | 0.066238 | 0.188515 | 113,249,082 | A | G | 3362 |
| rs11067054 | 2.58E−06 | 0.071644 | 0.16855 | 113,256,940 | A | G | 3363 |
| rs883079 | 2.71E−06 | 0.055535 | 0.304506 | 113,277,623 | C | T | 277 |
| rs2384407 | 2.92E−06 | −0.055678 | 0.697398 | 113,273,609 | A | G | 3364 |
| rs8181608 | 3.16E−06 | 0.065924 | 0.183954 | 113,245,966 | A | G | 259 |
| rs6489952 | 3.51E−06 | −0.065944 | 0.81572 | 113,243,156 | A | G | 256 |
| rs10744820 | 3.74E−06 | 0.065004 | 0.184141 | 113,252,510 | A | G | 265 |
| rs1895593 | 3.95E−06 | −0.064969 | 0.81561 | 113,245,198 | A | G | 257 |
| rs1895587 | 3.96E−06 | −0.06486 | 0.815854 | 113,253,912 | C | T | 266 |
| rs10744819 | 4.02E−06 | 0.064795 | 0.184162 | 113,246,213 | A | G | 263 |
| rs8181627 | 4.02E−06 | −0.064792 | 0.815838 | 113,246,147 | C | T | 262 |
| rs8181683 | 4.03E−06 | 0.06479 | 0.184162 | 113,246,101 | C | T | 261 |
| rs10744818 | 4.03E−06 | −0.064789 | 0.815838 | 113,246,068 | C | T | 260 |
| rs7966567 | 4.03E−06 | 0.064789 | 0.184183 | 113,245,863 | C | T | 258 |
| rs7964303 | 4.98E−06 | −0.057261 | 0.708289 | 113,298,669 | G | T | 292 |
| rs10507248 | 5.79E−06 | 0.054386 | 0.292588 | 113,281,476 | G | T | 281 |
| rs7955405 | 5.96E−06 | 0.054366 | 0.292166 | 113,281,689 | A | G | 282 |
| chr12: 113277199 | 7.03E−06 | −0.532326 | 0.991346 | 113,277,199 | C | T | 3365 |
| rs2016047 | 8.56E−06 | −0.067207 | 0.777817 | 113,244,799 | G | T | 3366 |
| rs1946295 | 1.01E−05 | 0.05324 | 0.28992 | 113,286,744 | T | C | 288 |
| rs9669457 | 1.20E−05 | 0.05684 | 0.252844 | 113,260,665 | A | G | 267 |
| rs7135659 | 1.43E−05 | −0.052453 | 0.716493 | 113,286,155 | A | G | 286 |
| rs4767239 | 1.53E−05 | −0.061188 | 0.798894 | 113,300,931 | C | G | 3367 |
| rs1946293 | 1.65E−05 | −0.052049 | 0.717743 | 113,287,143 | A | G | 289 |
| rs7312625 | 2.08E−05 | −0.051807 | 0.718133 | 113,284,357 | A | G | 284 |
| rs1920591 | 2.35E−05 | −0.053467 | 0.345134 | 113,190,592 | A | G | 3368 |
| rs4767237 | 2.48E−05 | 0.051329 | 0.280263 | 113,285,196 | A | G | 285 |
| rs2016045 | 2.56E−05 | −0.063886 | 0.783388 | 113,244,750 | A | T | 3369 |
| rs3825215 | 3.08E−05 | −0.051016 | 0.720456 | 113,289,281 | C | G | 290 |
| rs1895583 | 3.37E−05 | 0.05089 | 0.275231 | 113,291,268 | A | G | 3370 |
| rs1895582 | 3.37E−05 | −0.050742 | 0.723842 | 113,291,418 | A | G | 291 |
| rs1895585 | 3.39E−05 | 0.050387 | 0.277734 | 113,286,521 | A | G | 287 |
| rs7961277 | 3.57E−05 | −0.047989 | 0.54415 | 113,298,462 | C | T | 3371 |
| chr12: 113294500 | 4.27E−05 | 0.059077 | 0.682865 | 113,294,500 | C | T | 3372 |
| rs1920596 | 5.40E−05 | −0.044024 | 0.497044 | 113,188,795 | A | T | 3373 |
| rs2701106 | 5.76E−05 | −0.044274 | 0.512179 | 113,181,930 | A | G | 3374 |
| rs1920597 | 5.82E−05 | 0.043909 | 0.501774 | 113,188,475 | A | G | 3375 |
| chr12: 113329460 | 6.08E−05 | −0.184802 | 0.975672 | 113,329,460 | G | T | 3376 |
| rs2555030 | 7.21E−05 | 0.057616 | 0.186758 | 113,301,715 | A | G | 3377 |
| chr12: 113202956 | 9.70E−05 | −0.156959 | 0.956652 | 113,202,956 | A | G | 3378 |
| rs10850391 | 1.31E−04 | −0.042162 | 0.563302 | 113,814,252 | C | T | 3379 |
| chr12: 113202737 | 1.39E−04 | 0.163653 | 0.038218 | 113,202,737 | A | G | 3380 |
| rs73201471 | 1.42E−04 | 0.061061 | 0.584984 | 113,256,837 | C | T | 3381 |
| rs10850315 | 1.50E−04 | 0.046007 | 0.2758 | 113,251,118 | G | T | 3382 |
| chr12: 113180871 | 1.70E−04 | 0.066415 | 0.184086 | 113,180,871 | A | T | 3383 |
| rs57155932 | 1.78E−04 | −0.051836 | 0.74495 | 113,211,470 | A | G | 3384 |
| rs10744815 | 2.85E−04 | −0.040812 | 0.423341 | 113,197,765 | A | C | 3385 |
| chr12: 113200986 | 3.75E−04 | 0.102708 | 0.067363 | 113,200,986 | A | G | 3386 |
| rs16943956 | 4.17E−04 | −0.100546 | 0.93096 | 113,195,145 | A | G | 3387 |
| rs10850302 | 4.27E−04 | 0.039772 | 0.603081 | 113,196,478 | C | T | 3388 |
| chr12: 113180727 | 4.51E−04 | −0.10063 | 0.928886 | 113,180,727 | C | T | 3389 |
| rs1920593 | 4.72E−04 | −0.046749 | 0.790005 | 113,189,926 | C | T | 3390 |
| chr12: 112810144 | 4.81E−04 | −0.104583 | 0.962169 | 112,810,144 | A | G | 3391 |
| rs1920595 | 4.84E−04 | −0.046674 | 0.789669 | 113,189,705 | A | C | 3392 |
| rs12813238 | 4.97E−04 | 0.03927 | 0.602051 | 113,206,207 | C | T | 3393 |
| chr12: 113362401 | 5.02E−04 | −0.129026 | 0.954173 | 113,362,401 | A | G | 3394 |
| rs10774750 | 5.32E−04 | 0.039176 | 0.582247 | 113,231,916 | A | C | 3395 |
| rs7303255 | 5.34E−04 | 0.038774 | 0.585161 | 113,203,974 | C | T | 3396 |
| rs1247933 | 5.64E−04 | 0.065619 | 0.19241 | 113,176,419 | A | G | 3397 |
| rs2162320 | 5.65E−04 | −0.049598 | 0.806317 | 113,191,172 | C | T | 3398 |
| rs17660551 | 6.00E−04 | −0.045934 | 0.787133 | 113,188,005 | A | C | 3399 |
| rs16943344 | 6.04E−04 | −0.100221 | 0.960292 | 112,804,599 | C | T | 3400 |
| rs17660485 | 6.14E−04 | −0.04585 | 0.786898 | 113,187,497 | C | G | 3401 |
| rs7138015 | 6.46E−04 | 0.045648 | 0.213642 | 113,186,261 | A | C | 3402 |
| chr12: 112823960 | 6.53E−04 | −0.106002 | 0.964422 | 112,823,960 | C | T | 3403 |
| rs58562176 | 6.80E−04 | −0.045439 | 0.785834 | 113,185,837 | C | T | 3404 |
| rs17660176 | 6.91E−04 | 0.070772 | 0.154323 | 113,177,009 | A | G | 3405 |
| rs6489926 | 7.09E−04 | 0.106083 | 0.035129 | 112,825,678 | C | T | 3406 |
| rs17660241 | 7.41E−04 | 0.045344 | 0.214841 | 113,179,284 | A | G | 3407 |
| chr12: 112790402 | 7.50E−04 | −0.096214 | 0.959028 | 112,790,402 | A | G | 3408 |
| rs3782445 | 7.56E−04 | −0.095967 | 0.958974 | 112,797,276 | C | T | 3409 |
| chr12: 112798862 | 7.62E−04 | −0.095924 | 0.958991 | 112,798,862 | C | T | 3410 |
| chr12: 113181795 | 7.77E−04 | −0.044947 | 0.784582 | 113,181,795 | A | G | 3411 |
| rs58872758 | 7.93E−04 | −0.04495 | 0.784238 | 113,180,030 | G | T | 3412 |
| chr12: 112784915 | 8.59E−04 | −0.095865 | 0.959301 | 112,784,915 | C | T | 3413 |
| rs11610607 | 8.65E−04 | 0.037903 | 0.639796 | 113,183,152 | A | G | 3414 |
| rs12426785 | 8.74E−04 | 0.037839 | 0.639772 | 113,185,981 | C | T | 3415 |
| rs11608388 | 8.81E−04 | −0.037792 | 0.360189 | 113,188,057 | A | C | 3416 |
| rs12425958 | 8.91E−04 | −0.095737 | 0.95937 | 112,784,122 | C | T | 3417 |
| chr12: 113579001 | 9.11E−04 | −0.144237 | 0.983231 | 113,579,001 | A | G | 3418 |
| rs12422921 | 9.71E−04 | −0.095491 | 0.959575 | 112,783,418 | G | T | 3419 |
| rs60029182 | 9.95E−04 | −0.046656 | 0.815531 | 113,227,756 | G | T | 3420 |
| rs57797354 | 1.01E−03 | 0.047947 | 0.171614 | 113,211,534 | C | T | 3421 |
| chr12: 113219987 | 1.01E−03 | 0.046316 | 0.192844 | 113,219,987 | A | C | 3422 |
| chr12: 13732445 | 1.04E−03 | −0.215436 | 0.013737 | 113,732,445 | A | G | 3423 |
| rs4767236 | 1.05E−03 | 0.046249 | 0.185644 | 113,221,039 | A | G | 3424 |
| rs12372752 | 1.06E−03 | −0.076544 | 0.168241 | 113,406,493 | A | G | 3425 |
| rs1078568 | 1.06E−03 | −0.046144 | 0.814344 | 113,220,504 | A | G | 3426 |
| rs1078567 | 1.07E−03 | −0.046107 | 0.814344 | 113,220,355 | A | G | 3427 |
| rs4259873 | 1.08E−03 | −0.04606 | 0.814508 | 113,219,162 | C | T | 3428 |
| rs4556590 | 1.09E−03 | 0.045974 | 0.185657 | 113,219,302 | C | T | 3429 |
| chr12: 113324458 | 1.10E−03 | −0.136702 | 0.973355 | 113,324,458 | A | C | 3430 |
| rs4540867 | 1.11E−03 | 0.045878 | 0.185657 | 113,218,077 | A | G | 3431 |
| rs753564 | 1.12E−03 | −0.045821 | 0.814343 | 113,217,328 | C | G | 3432 |
| chr12: 113383797 | 1.12E−03 | −0.141594 | 0.982428 | 113,383,797 | C | T | 3433 |
| rs4766729 | 1.15E−03 | 0.045175 | 0.190868 | 113,214,255 | C | G | 3434 |
| rs60302750 | 1.18E−03 | 0.045459 | 0.185243 | 113,209,985 | A | G | 3435 |
| rs1896018 | 1.19E−03 | −0.045544 | 0.815754 | 113,215,780 | A | G | 3436 |
| chr12: 113350212 | 1.20E−03 | 0.130523 | 0.027835 | 113,350,212 | A | C | 3437 |
| chr12: 113227545 | 1.21E−03 | −0.082289 | 0.919637 | 113,227,545 | C | T | 3438 |
| rs1896016 | 1.22E−03 | 0.04539 | 0.184476 | 113,215,558 | C | T | 3439 |
| rs1896015 | 1.22E−03 | 0.045384 | 0.184476 | 113,215,473 | A | T | 3440 |
| rs4261334 | 1.23E−03 | −0.045331 | 0.815524 | 113,214,723 | A | C | 3441 |
| rs4274232 | 1.23E−03 | 0.045323 | 0.184476 | 113,214,598 | C | T | 3442 |
| rs59777856 | 1.24E−03 | −0.045315 | 0.815591 | 113,213,862 | G | T | 3443 |
| chr12: 113213806 | 1.24E−03 | −0.04527 | 0.815523 | 113,213,806 | A | G | 3444 |
| chr12: 113268550 | 1.25E−03 | −0.077174 | 0.123983 | 113,268,550 | A | G | 3445 |
| rs60772998 | 1.25E−03 | 0.045237 | 0.184466 | 113,213,250 | A | G | 3446 |
| chr12: 113212688 | 1.26E−03 | 0.045214 | 0.184456 | 113,212,688 | A | G | 3447 |
| rs60268458 | 1.26E−03 | −0.045204 | 0.815552 | 113,212,437 | A | C | 3448 |
| rs1896014 | 1.28E−03 | 0.045086 | 0.184363 | 113,209,532 | A | G | 3449 |
| rs1896013 | 1.29E−03 | −0.045082 | 0.815639 | 113,209,450 | C | T | 3450 |
| rs1896012 | 1.29E−03 | 0.045081 | 0.18436 | 113,209,430 | C | T | 3451 |
| chr12: 113208133 | 1.30E−03 | −0.045009 | 0.815691 | 113,208,133 | A | T | 3452 |
| rs3782455 | 1.42E−03 | 0.087106 | 0.042204 | 112,843,648 | T | G | 3453 |
| rs16943340 | 1.45E−03 | −0.093704 | 0.960428 | 112,779,485 | C | T | 3454 |
| chr12: 112383295 | 1.45E−03 | −0.079289 | 0.852686 | 112,383,295 | C | T | 3455 |
| chr12: 113574398 | 1.61E−03 | 0.06362 | 0.238678 | 113,574,398 | A | G | 3456 |
| chr12: 113574393 | 1.63E−03 | 0.059167 | 0.282669 | 113,574,393 | A | G | 3457 |
| chr12: 113711753 | 1.69E−03 | 0.075603 | 0.943948 | 113,711,753 | C | T | 3458 |
| chr12: 112607596 | 1.78E−03 | 0.120073 | 0.027682 | 112,607,596 | A | C | 3459 |
| rs1458705 | 1.82E−03 | −0.054797 | 0.896153 | 112,938,219 | A | G | 3460 |
| chr12: 113566963 | 2.04E−03 | 0.122601 | 0.020445 | 113,566,963 | A | G | 3461 |
| rs10507243 | 2.16E−03 | 0.034082 | 0.575798 | 113,193,181 | A | G | 3462 |
| chr12: 112976915 | 2.23E−03 | −0.150199 | 0.976887 | 112,976,915 | C | T | 3463 |
| chr12: 113419930 | 2.34E−03 | 0.059491 | 0.309005 | 113,419,930 | G | T | 3464 |
| rs2052738 | 2.38E−03 | 0.033578 | 0.498154 | 112,537,633 | A | G | 3465 |
| rs7973374 | 2.40E−03 | 0.034208 | 0.609722 | 113,195,065 | C | T | 3466 |
| rs7977369 | 2.49E−03 | −0.0413 | 0.799173 | 113,196,032 | C | T | 3467 |
| chr12: 113205016 | 2.51E−03 | 0.041267 | 0.197894 | 113,205,016 | A | G | 3468 |
| rs2484589 | 2.52E−03 | −0.051541 | 0.145288 | 113,809,649 | A | G | 3469 |
| chr12: 112759378 | 2.52E−03 | 0.104504 | 0.030456 | 112,759,378 | C | G | 3470 |
| rs12579617 | 2.59E−03 | −0.033189 | 0.42287 | 113,210,458 | A | G | 3471 |
| chr12: 113198160 | 2.62E−03 | −0.04108 | 0.799802 | 113,198,160 | C | T | 3472 |
| chr12: 113451244 | 2.62E−03 | 0.12934 | 0.018602 | 113,451,244 | A | G | 3473 |
| rs12825923 | 2.64E−03 | −0.0331 | 0.422471 | 113,208,622 | A | G | 3474 |
| rs4766728 | 2.64E−03 | 0.04102 | 0.199688 | 113,199,628 | C | T | 3475 |
| rs7132243 | 2.64E−03 | 0.041016 | 0.199599 | 113,202,664 | C | T | 3476 |
| chr12: 113198279 | 2.65E−03 | −0.04099 | 0.80049 | 113,198,279 | A | C | 3477 |
| rs7315118 | 2.66E−03 | −0.033068 | 0.422231 | 113,206,867 | A | G | 3478 |
| rs11067028 | 2.66E−03 | 0.03306 | 0.577774 | 113,206,623 | A | G | 3479 |
| rs11608430 | 2.67E−03 | −0.033046 | 0.422225 | 113,205,886 | A | G | 3480 |
| rs10850305 | 2.67E−03 | −0.033046 | 0.422179 | 113,205,530 | C | T | 3481 |
| rs7314743 | 2.67E−03 | 0.033036 | 0.577841 | 113,203,030 | A | G | 3482 |
| rs11067027 | 2.68E−03 | 0.03303 | 0.577859 | 113,202,524 | G | T | 3483 |
| rs7973207 | 2.68E−03 | 0.033027 | 0.577899 | 113,198,429 | C | T | 3484 |
| rs10744816 | 2.68E−03 | −0.033024 | 0.422129 | 113,198,649 | C | T | 3485 |
| rs7314353 | 2.69E−03 | 0.033024 | 0.577922 | 113,202,776 | A | G | 3486 |
| chr12: 113700621 | 2.69E−03 | −0.101089 | 0.941078 | 113,700,621 | A | T | 3487 |
| rs55870641 | 2.78E−03 | 0.040753 | 0.198275 | 113,206,637 | C | T | 3488 |
| chr12: 113204921 | 2.80E−03 | 0.040728 | 0.198265 | 113,204,921 | C | T | 3489 |
| chr12: 113204801 | 2.80E−03 | −0.040728 | 0.801735 | 113,204,801 | G | T | 3490 |
| rs6489949 | 2.80E−03 | −0.040721 | 0.801738 | 113,202,536 | C | T | 3491 |
| rs58412031 | 2.80E−03 | −0.040713 | 0.801741 | 113,199,493 | C | T | 3492 |
| chr12: 112552749 | 2.87E−03 | 0.171391 | 0.014032 | 112,552,749 | A | G | 3493 |
| chr12: 113098529 | 2.87E−03 | 0.152842 | 0.023723 | 113,098,529 | A | G | 3494 |
| chr12: 113464954 | 2.92E−03 | 0.129382 | 0.019134 | 113,464,954 | A | G | 3495 |
| rs28423047 | 2.96E−03 | −0.04471 | 0.203897 | 113,279,211 | C | G | 3496 |
| rs10774783 | 2.98E−03 | −0.036781 | 0.596464 | 113,868,201 | A | G | 3497 |
| chr12: 112317197 | 3.14E−03 | 0.779193 | 0.003019 | 112,317,197 | A | C | 3498 |
| rs1895602 | 3.28E−03 | 0.034432 | 0.518661 | 113,319,811 | A | C | 3499 |
| rs16944547 | 3.32E−03 | 0.112397 | 0.020608 | 113,546,339 | C | T | 3500 |
| chr12: 113463839 | 3.33E−03 | −0.078777 | 0.943949 | 113,463,839 | C | G | 3501 |
| chr12: 113544303 | 3.40E−03 | −0.112012 | 0.979425 | 113,544,303 | G | T | 3502 |
| rs10774743 | 3.41E−03 | 0.032634 | 0.598604 | 113,209,047 | C | T | 3503 |
| rs10850304 | 3.43E−03 | 0.032629 | 0.599518 | 113,205,136 | C | T | 3504 |
| rs11614542 | 3.44E−03 | 0.0326 | 0.599156 | 113,205,721 | A | G | 3505 |
| rs10850303 | 3.46E−03 | 0.032595 | 0.599457 | 113,196,587 | G | T | 3506 |
| rs10850301 | 3.48E−03 | −0.032544 | 0.400884 | 113,196,041 | A | G | 3507 |
| rs7963168 | 3.49E−03 | −0.032537 | 0.400893 | 113,195,449 | C | T | 3508 |
| rs59448837 | 3.55E−03 | −0.111474 | 0.979438 | 113,542,021 | C | T | 3509 |
| rs16934281 | 3.58E−03 | −0.111396 | 0.979439 | 113,541,224 | A | G | 3510 |
| chr12: 113541135 | 3.58E−03 | −0.111388 | 0.97944 | 113,541,135 | C | G | 3511 |
| chr12: 113540897 | 3.59E−03 | 0.111347 | 0.020559 | 113,540,897 | C | G | 3512 |
| rs11067021 | 3.61E−03 | −0.032404 | 0.401154 | 113,194,097 | A | G | 3513 |
| rs7300648 | 3.66E−03 | 0.111107 | 0.020554 | 113,539,640 | A | G | 3514 |
| chr12: 113538985 | 3.68E−03 | 0.111068 | 0.020559 | 113,538,985 | G | T | 3515 |
| rs7297701 | 3.69E−03 | −0.032413 | 0.399684 | 113,202,792 | A | G | 3516 |
| chr12: 113819546 | 3.73E−03 | −0.423187 | 0.993509 | 113,819,546 | C | T | 3517 |
| rs1896010 | 3.74E−03 | −0.031884 | 0.424578 | 113,193,870 | A | G | 3518 |
| rs4261333 | 3.89E−03 | 0.031983 | 0.580364 | 113,214,722 | A | G | 3519 |
| rs11067288 | 3.91E−03 | −0.06834 | 0.057604 | 113,695,399 | C | T | 3520 |
| chr12: 113032676 | 3.93E−03 | 0.258423 | 0.994231 | 113,032,676 | A | C | 3521 |
| rs1895604 | 3.96E−03 | 0.033044 | 0.468775 | 113,318,062 | A | C | 3522 |
| chr12: 113869864 | 3.96E−03 | −0.04193 | 0.232371 | 113,869,864 | A | G | 3523 |
| chr12: 113814566 | 4.04E−03 | 0.140303 | 0.027063 | 113,814,566 | A | G | 3524 |
| chr12: 113466781 | 4.06E−03 | −0.12213 | 0.979558 | 113,466,781 | C | T | 3525 |
| chr12: 113852362 | 4.11E−03 | 0.057013 | 0.213377 | 113,852,362 | C | T | 3526 |
| rs1896004 | 4.13E−03 | −0.031946 | 0.419486 | 113,223,366 | C | G | 3527 |
| rs7298356 | 4.25E−03 | 0.031423 | 0.573747 | 113,192,523 | G | T | 3528 |
| rs1955098 | 4.27E−03 | 0.031735 | 0.580988 | 113,220,426 | A | G | 3529 |
| chr12: 113394225 | 4.57E−03 | −0.096614 | 0.972684 | 113,394,225 | C | T | 3530 |
| chr12: 113381615 | 4.62E−03 | 0.237749 | 0.993363 | 113,381,615 | C | T | 3531 |
| chr12: 113299763 | 4.93E−03 | −0.053551 | 0.696837 | 113,299,763 | A | T | 3532 |
| chr12: 112753344 | 5.19E−03 | −0.099736 | 0.97304 | 112,753,344 | A | C | 3533 |
| rs56940775 | 5.47E−03 | 0.099295 | 0.026953 | 112,752,159 | C | T | 3534 |
| rs11067037 | 5.54E−03 | −0.031465 | 0.398455 | 113,231,340 | C | T | 3535 |
| chr12: 112372775 | 5.60E−03 | 0.069842 | 0.234878 | 112,372,775 | A | C | 3536 |
| rs16934279 | 5.60E−03 | −0.067971 | 0.93889 | 113,378,758 | A | C | 3537 |
| rs725086 | 5.70E−03 | 0.031319 | 0.601982 | 113,230,122 | C | T | 3538 |
| rs7962399 | 5.74E−03 | 0.031255 | 0.602158 | 113,228,631 | A | G | 3539 |
| rs2114326 | 5.75E−03 | −0.031238 | 0.397763 | 113,228,027 | A | C | 3540 |
| chr12: 113325961 | 5.77E−03 | −0.103958 | 0.922456 | 113,325,961 | C | G | 3541 |
| rs17731569 | 5.77E−03 | −0.037684 | 0.792003 | 113,312,090 | A | G | 293 |
| rs4767108 | 5.80E−03 | 0.035836 | 0.278301 | 112,556,484 | G | T | 3542 |
| chr12: 112966339 | 5.81E−03 | 0.049553 | 0.141971 | 112,966,339 | A | G | 3543 |
| rs10850310 | 5.81E−03 | 0.031114 | 0.602596 | 113,221,288 | A | G | 3544 |
| rs1718375 | 5.85E−03 | 0.078002 | 0.960425 | 113,511,503 | A | G | 3545 |
| rs1895606 | 5.86E−03 | −0.030623 | 0.486339 | 113,317,767 | C | T | 3546 |
| chr12: 112751638 | 5.87E−03 | 0.098548 | 0.02653 | 112,751,638 | C | G | 3547 |
| rs3825209 | 5.97E−03 | 0.092773 | 0.027359 | 112,835,440 | C | T | 3548 |
| rs3782454 | 6.00E−03 | −0.092709 | 0.97266 | 112,835,598 | A | G | 3549 |
| chr12: 113489582 | 6.05E−03 | 0.230313 | 0.995232 | 113,489,582 | C | T | 3550 |
| chr12: 113489583 | 6.06E−03 | 0.232211 | 0.995297 | 113,489,583 | A | G | 3551 |
| rs1650059 | 6.19E−03 | −0.07694 | 0.039745 | 113,510,112 | C | T | 3552 |
| rs7487654 | 6.23E−03 | −0.058413 | 0.150034 | 113,796,605 | A | G | 3553 |
| rs1718376 | 6.28E−03 | −0.076815 | 0.039704 | 113,509,911 | A | T | 3554 |
| rs71442773 | 6.28E−03 | −0.064235 | 0.931593 | 113,379,331 | C | G | 3555 |
| rs7955377 | 6.29E−03 | −0.031113 | 0.396279 | 113,230,943 | A | G | 3556 |
| rs1718378 | 6.32E−03 | 0.07663 | 0.960202 | 113,508,466 | C | G | 3557 |
| rs7959528 | 6.33E−03 | −0.076626 | 0.039784 | 113,508,037 | C | T | 3558 |
| rs1718377 | 6.35E−03 | −0.076649 | 0.039744 | 113,508,620 | A | G | 3559 |
| rs1895605 | 6.41E−03 | −0.030285 | 0.487243 | 113,317,998 | A | G | 3560 |
| rs12229163 | 6.62E−03 | 0.062244 | 0.069726 | 113,384,812 | C | T | 3561 |
| rs1247936 | 6.75E−03 | 0.03045 | 0.551152 | 113,192,257 | C | T | 3562 |
| chr12: 112687164 | 6.77E−03 | 0.200237 | 0.009877 | 112,687,164 | C | G | 3563 |
| rs11067148 | 6.77E−03 | −0.049297 | 0.880403 | 113,426,887 | C | T | 3564 |
| rs10850293 | 6.78E−03 | 0.064074 | 0.942287 | 113,160,874 | C | T | 3565 |
| chr12: 113386769 | 6.82E−03 | 0.066033 | 0.060434 | 113,386,769 | A | C | 3566 |
| rs714253 | 6.89E−03 | −0.034332 | 0.75678 | 113,125,667 | A | G | 3567 |
| rs10507252 | 6.91E−03 | 0.059918 | 0.933461 | 113,690,748 | A | G | 3568 |
| chr12: 113724159 | 7.10E−03 | −0.079947 | 0.040181 | 113,724,159 | C | T | 3569 |
| chr12: 113152299 | 7.30E−03 | −0.062944 | 0.059861 | 113,152,299 | C | T | 3570 |
| rs12302924 | 7.34E−03 | 0.063048 | 0.940171 | 113,151,569 | C | T | 3571 |
| rs11831311 | 7.38E−03 | −0.063102 | 0.059728 | 113,150,948 | A | C | 3572 |
| rs10850298 | 7.44E−03 | −0.055233 | 0.811251 | 113,180,859 | A | T | 3573 |
| rs1896001 | 7.45E−03 | 0.031397 | 0.445075 | 113,213,388 | T | C | 3574 |
| chr12: 112950334 | 7.50E−03 | 0.049612 | 0.097315 | 112,950,334 | A | G | 3575 |
| rs1920566 | 7.59E−03 | −0.063089 | 0.059574 | 113,150,063 | A | G | 3576 |
| rs16944338 | 7.66E−03 | −0.06575 | 0.944481 | 113,379,111 | C | T | 3577 |
| rs11611982 | 7.76E−03 | 0.130258 | 0.015745 | 112,668,110 | A | G | 3578 |
| rs11066991 | 7.80E−03 | −0.033693 | 0.755546 | 113,134,878 | C | T | 3579 |
| chr12: 113692990 | 7.93E−03 | −0.060723 | 0.061791 | 113,692,990 | A | C | 3580 |
| rs11066711 | 7.96E−03 | −0.065863 | 0.935267 | 112,648,969 | C | T | 3581 |
| rs3843645 | 8.19E−03 | −0.06438 | 0.944741 | 113,382,729 | C | T | 3582 |
| rs11067127 | 8.26E−03 | 0.064058 | 0.055555 | 113,389,721 | C | G | 3583 |
| chr12: 113387553 | 8.32E−03 | 0.064027 | 0.055148 | 113,387,553 | A | G | 3584 |
| rs4767235 | 8.44E−03 | −0.03316 | 0.752781 | 113,122,292 | A | G | 3585 |
| rs34536114 | 8.52E−03 | 0.033041 | 0.245579 | 113,122,898 | C | T | 3586 |
| rs16943814 | 8.54E−03 | 0.032988 | 0.24591 | 113,125,101 | A | C | 3587 |
| rs11066982 | 8.54E−03 | −0.033136 | 0.75552 | 113,119,826 | C | T | 3588 |
| chr12: 113388455 | 8.55E−03 | −0.063766 | 0.944782 | 113,388,455 | C | T | 3589 |
| rs12367740 | 8.55E−03 | −0.032992 | 0.754122 | 113,126,183 | C | T | 3590 |
| chr12: 113393194 | 8.55E−03 | −0.063551 | 0.944933 | 113,393,194 | A | C | 3591 |
| rs11066980 | 8.57E−03 | 0.033471 | 0.237664 | 113,116,454 | A | G | 3592 |
| rs5025218 | 8.61E−03 | −0.06341 | 0.94497 | 113,395,228 | A | C | 3593 |
| chr12: 113582196 | 8.67E−03 | 0.218912 | 0.993241 | 113,582,196 | C | T | 3594 |
| rs12424926 | 8.68E−03 | −0.096857 | 0.977757 | 112,946,788 | C | T | 3595 |
| chr12: 113394267 | 8.70E−03 | 0.063364 | 0.055091 | 113,394,267 | C | T | 3596 |
| rs61930980 | 8.81E−03 | −0.032553 | 0.26388 | 113,258,868 | A | G | 3597 |
| rs10850321 | 8.88E−03 | 0.032474 | 0.735559 | 113,265,025 | C | G | 3598 |
| chr12: 112746178 | 8.88E−03 | 0.094921 | 0.024786 | 112,746,178 | C | T | 3599 |
| chr12: 112949950 | 8.89E−03 | −0.096737 | 0.97784 | 112,949,950 | A | G | 3600 |
| chr12: 112842125 | 8.90E−03 | 0.088354 | 0.026168 | 112,842,125 | A | C | 3601 |
| chr12: 113015483 | 8.92E−03 | 0.169795 | 0.986128 | 113,015,483 | A | G | 3602 |
| rs73394891 | 8.93E−03 | −0.062987 | 0.944938 | 113,399,694 | C | T | 3603 |
| rs11067089 | 8.94E−03 | −0.031207 | 0.355798 | 113,297,009 | C | T | 3604 |
| rs5025219 | 8.99E−03 | 0.063075 | 0.055156 | 113,395,083 | A | T | 3605 |
| chr12: 112842418 | 9.10E−03 | −0.088104 | 0.973895 | 112,842,418 | C | T | 3606 |
| chr12: 112842661 | 9.24E−03 | 0.087922 | 0.026058 | 112,842,661 | C | G | 3607 |
| rs513061 | 9.47E−03 | −0.041524 | 0.805637 | 113,589,060 | T | C | 3608 |
| chr12: 112742662 | 9.59E−03 | 0.078497 | 0.038839 | 112,742,662 | C | G | 3609 |
| rs7309593 | 9.67E−03 | 0.078636 | 0.038805 | 112,741,591 | G | T | 3610 |
| rs16944342 | 9.77E−03 | −0.06206 | 0.941217 | 113,381,253 | A | G | 3611 |
| chr12: 112860534 | 9.82E−03 | −0.087219 | 0.974138 | 112,860,534 | C | T | 3612 |
| chr12: 112858391 | 9.82E−03 | 0.087218 | 0.025862 | 112,858,391 | C | T | 3613 |
| chr12: 112861860 | 9.82E−03 | −0.087217 | 0.974138 | 112,861,860 | C | T | 3614 |
| rs12422551 | 9.83E−03 | 0.08719 | 0.025864 | 112,849,732 | C | T | 3615 |
| chr12: 112743374 | 9.86E−03 | −0.077657 | 0.960862 | 112,743,374 | C | G | 3616 |
| rs2290800 | 9.87E−03 | −0.08822 | 0.974302 | 112,888,766 | T | G | 3617 |
| rs2290793 | 9.89E−03 | −0.087205 | 0.974148 | 112,868,747 | C | T | 3618 |
| rs1380004 | 9.93E−03 | 0.087189 | 0.025846 | 112,875,147 | C | T | 3619 |
| chr12: 112878896 | 9.93E−03 | 0.087189 | 0.025845 | 112,878,896 | A | G | 3620 |
| rs11833922 | 9.96E−03 | 0.0291 | 0.452354 | 113,869,352 | A | G | 3621 |
| rs3825211 | 9.99E−03 | 0.087161 | 0.025836 | 112,881,080 | C | T | 3622 |
| rs3825212 | 9.99E−03 | 0.087158 | 0.025836 | 112,881,124 | A | T | 3623 |

Shown is marker identity, p-value of the association, magnitude of effect (in units of fractions of standard deviations), frequency of effect allele, position in NCBI Build 36, identity of effect allele, identity of other allele, SEQ ID for the marker. It should be noted that a positive value for an effect represents an increase in the interval conferred by the effect allele, while a negative value for the effect represents a decrease (i.e. the allele correlated with the negative effect is predictive of a decreased value of the measure).

TABLE 14
Association results for PR interval in a 2 Mb region flanking rs3825214 on
chromosome 12. Shown is marker identity, p-value of the association, magnitude of effect (in
units of fractions of standard deviations), frequency of effect allele, position in NCBI Build 36,
identity of effect allele, identity of other allele, SEQ ID for the marker. It should be noted that a
positive value for an effect represents a predicted increase in the interval conferred by the effect
allele, while a negative value for the effect represents a decrease (i.e. the allele correlated with
the negative effect is predictive of a decreased value of the measure).

| | | | | | effect | other | |
|---|---|---|---|---|---|---|---|
| marker | p-value | effect | freq | position | allele | allele | SEQ ID NO: |
| rs10850371 | 7.93E−07 | 0.057551 | 0.430437 | 113,652,609 | C | T | 2819 |
| rs2134219 | 1.03E−06 | 0.056266 | 0.530922 | 113,663,910 | C | G | 2820 |
| rs10850373 | 1.42E−06 | 0.057378 | 0.421858 | 113,653,862 | A | G | 2821 |
| rs10744832 | 3.50E−06 | −0.056243 | 0.630348 | 113,662,838 | C | T | 2822 |
| rs10774763 | 3.86E−06 | 0.05622 | 0.361557 | 113,652,756 | A | G | 2823 |
| rs10774766 | 4.13E−06 | −0.055091 | 0.635961 | 113,656,237 | C | T | 2824 |
| chr12: 113306769 | 4.41E−06 | −0.353152 | 0.980677 | 113,306,769 | C | G | 2825 |
| rs7979951 | 4.48E−06 | −0.057551 | 0.344101 | 113,669,320 | A | T | 2826 |
| rs11067268 | 4.71E−06 | −0.055006 | 0.639191 | 113,654,584 | C | T | 2827 |
| rs12302975 | 5.03E−06 | 0.054949 | 0.369425 | 113,658,331 | C | T | 2828 |
| rs2062716 | 6.26E−06 | −0.051529 | 0.579814 | 113,658,640 | C | T | 2829 |
| rs10774764 | 7.06E−06 | −0.051814 | 0.590562 | 113,652,823 | A | G | 2830 |
| rs2173957 | 8.09E−06 | −0.053367 | 0.598238 | 113,665,488 | A | G | 2831 |
| rs2173958 | 9.12E−06 | 0.052694 | 0.402674 | 113,663,629 | G | T | 2832 |
| rs2062715 | 9.68E−06 | −0.051711 | 0.589196 | 113,661,010 | A | G | 2833 |
| rs10850372 | 1.16E−05 | 0.052171 | 0.393652 | 113,652,726 | C | T | 2834 |
| chr12: 113325961 | 1.18E−05 | −0.168788 | 0.922456 | 113,325,961 | C | G | 2835 |
| rs2891503 | 1.25E−05 | 0.05932 | 0.238778 | 113,274,193 | A | G | 272 |
| rs10219718 | 1.33E−05 | −0.052296 | 0.586101 | 113,662,422 | C | T | 2836 |
| rs7134874 | 1.36E−05 | −0.051355 | 0.589231 | 113,664,540 | G | T | 2837 |
| rs3759174 | 1.39E−05 | −0.068535 | 0.717644 | 113,608,121 | C | G | 2838 |
| rs2384409 | 1.42E−05 | 0.059245 | 0.219567 | 113,273,861 | A | G | 271 |
| rs7316919 | 1.44E−05 | 0.058835 | 0.221127 | 113,275,838 | A | C | 275 |
| rs6489956 | 1.45E−05 | −0.058731 | 0.778493 | 113,276,619 | C | T | 276 |
| rs2113433 | 1.47E−05 | −0.058497 | 0.777774 | 113,278,440 | G | T | 278 |
| rs1920591 | 1.52E−05 | −0.056069 | 0.345134 | 113,190,592 | A | G | 2839 |
| rs1895597 | 1.63E−05 | −0.058075 | 0.769214 | 113,275,267 | A | T | 274 |
| rs7964303 | 1.91E−05 | −0.05495 | 0.708289 | 113,298,669 | G | T | 292 |
| rs7977083 | 2.00E−05 | 0.055968 | 0.25662 | 113,274,883 | A | G | 273 |
| rs12302135 | 2.16E−05 | −0.052937 | 0.697445 | 113,191,009 | C | T | 2840 |
| rs4767249 | 2.28E−05 | −0.048413 | 0.453856 | 113,660,063 | A | G | 2841 |
| rs3825214 | 2.34E−05 | −0.057024 | 0.781334 | 113,279,826 | A | G | 279 |
| chr12: 113577245 | 2.57E−05 | −0.082063 | 0.187876 | 113,577,245 | C | T | 2842 |
| rs2062717 | 2.62E−05 | −0.047311 | 0.448219 | 113,658,476 | A | G | 2843 |
| rs2062713 | 2.71E−05 | 0.047498 | 0.558064 | 113,660,935 | C | T | 2844 |
| rs2062714 | 2.72E−05 | 0.047474 | 0.558245 | 113,660,989 | G | T | 2845 |
| rs11067267 | 2.76E−05 | 0.047568 | 0.543058 | 113,654,410 | G | T | 2846 |
| rs12424875 | 3.23E−05 | 0.049172 | 0.523314 | 113,671,713 | C | T | 2847 |
| rs2701106 | 3.27E−05 | −0.046855 | 0.512179 | 113,181,930 | A | G | 2848 |
| rs7308120 | 3.32E−05 | −0.057068 | 0.784397 | 113,273,429 | C | T | 270 |
| rs2384408 | 3.35E−05 | 0.056996 | 0.215815 | 113,273,733 | A | G | 2849 |
| rs12367410 | 3.37E−05 | −0.056488 | 0.783762 | 113,281,071 | C | T | 280 |
| rs10774765 | 3.51E−05 | 0.047576 | 0.54067 | 113,653,064 | G | T | 2850 |
| rs883079 | 3.51E−05 | 0.050168 | 0.304506 | 113,277,623 | C | T | 277 |
| rs2384407 | 3.72E−05 | −0.050296 | 0.697398 | 113,273,609 | A | G | 2851 |
| chr12: 113315810 | 3.76E−05 | −0.106639 | 0.877438 | 113,315,810 | A | C | 2852 |
| rs2134220 | 4.00E−05 | −0.048422 | 0.384636 | 113,663,704 | A | G | 2853 |
| rs12314828 | 4.91E−05 | −0.053796 | 0.517481 | 113,652,522 | A | G | 2854 |
| rs35023333 | 5.07E−05 | −0.109808 | 0.938187 | 113,574,784 | C | T | 2855 |
| rs2555030 | 5.11E−05 | 0.060222 | 0.186758 | 113,301,715 | A | G | 2856 |
| rs10744823 | 5.25E−05 | 0.05575 | 0.216396 | 113,282,465 | C | T | 283 |
| rs10431392 | 6.47E−05 | −0.093687 | 0.915649 | 113,588,026 | A | G | 2857 |
| rs10850377 | 6.68E−05 | −0.046908 | 0.363447 | 113,685,819 | A | G | 2858 |
| rs4767250 | 6.98E−05 | 0.050771 | 0.644904 | 113,667,311 | G | T | 2859 |
| rs11067277 | 7.04E−05 | 0.048444 | 0.561052 | 113,666,342 | C | T | 2860 |
| rs11608388 | 7.31E−05 | −0.046214 | 0.360189 | 113,188,057 | A | C | 2861 |
| rs11610607 | 7.31E−05 | 0.046277 | 0.639796 | 113,183,152 | A | G | 2862 |
| rs12426785 | 7.31E−05 | 0.046236 | 0.639772 | 113,185,981 | C | T | 2863 |
| rs10744833 | 7.36E−05 | −0.045996 | 0.483158 | 113,672,466 | A | G | 2864 |
| chr12: 113422460 | 7.38E−05 | −0.289538 | 0.98279 | 113,422,460 | A | G | 2865 |
| rs7311915 | 7.52E−05 | 0.046374 | 0.365692 | 113,855,525 | C | G | 2866 |
| rs4767253 | 7.59E−05 | −0.054737 | 0.720724 | 113,682,079 | C | G | 2867 |
| rs1862909 | 8.14E−05 | 0.055677 | 0.200957 | 113,271,488 | A | G | 2868 |
| rs11067275 | 8.41E−05 | 0.051696 | 0.281985 | 113,665,093 | C | T | 2869 |
| rs1946295 | 8.74E−05 | 0.048428 | 0.28992 | 113,286,744 | T | C | 288 |
| rs7309910 | 8.77E−05 | 0.055548 | 0.200136 | 113,270,637 | C | G | 269 |
| chr12: 113684980 | 9.06E−05 | −0.045989 | 0.370117 | 113,684,980 | C | T | 2870 |
| rs12228985 | 9.38E−05 | 0.104954 | 0.060947 | 113,585,467 | A | T | 2871 |
| chr12: 113593897 | 9.53E−05 | −0.106402 | 0.940196 | 113,593,897 | C | T | 2872 |
| chr12: 113237864 | 9.67E−05 | 0.124114 | 0.966735 | 113,237,864 | G | T | 2873 |
| rs10507248 | 1.02E−04 | 0.047755 | 0.292588 | 113,281,476 | G | T | 281 |
| rs6489955 | 1.03E−04 | −0.05514 | 0.801216 | 113,269,662 | A | G | 268 |
| rs10744822 | 1.05E−04 | 0.05521 | 0.198608 | 113,268,423 | C | T | 2874 |
| rs7955405 | 1.08E−04 | 0.047605 | 0.292166 | 113,281,689 | A | G | 282 |
| rs11067280 | 1.17E−04 | −0.047051 | 0.331227 | 113,674,984 | A | G | 2875 |
| rs10850409 | 1.35E−04 | 0.045963 | 0.347359 | 113,866,123 | A | G | 2876 |
| rs12422933 | 1.38E−04 | −0.059331 | 0.351224 | 113,591,071 | A | C | 2877 |
| rs7138531 | 1.42E−04 | −0.045916 | 0.422417 | 113,650,674 | A | G | 2878 |
| rs17731569 | 1.42E−04 | −0.053115 | 0.792003 | 113,312,090 | A | G | 293 |
| rs11067279 | 1.45E−04 | 0.046653 | 0.662866 | 113,670,422 | A | C | 2879 |
| rs10850378 | 1.48E−04 | 0.044575 | 0.648136 | 113,688,002 | C | T | 2880 |
| rs7313200 | 1.55E−04 | −0.04565 | 0.421676 | 113,650,579 | C | T | 2881 |
| rs3741695 | 1.61E−04 | −0.100976 | 0.93865 | 113,593,282 | C | T | 2882 |
| rs61931191 | 1.62E−04 | 0.044482 | 0.64752 | 113,688,814 | G | T | 2883 |
| rs11615965 | 1.62E−04 | 0.04448 | 0.647464 | 113,688,840 | C | T | 2884 |
| chr12: 113689107 | 1.69E−04 | −0.044878 | 0.349154 | 113,689,107 | A | G | 2885 |
| rs12370593 | 1.72E−04 | 0.045785 | 0.663827 | 113,673,744 | C | T | 2886 |
| chr12: 113234638 | 1.72E−04 | −0.781926 | 0.991611 | 113,234,638 | G | T | 2887 |
| rs3858619 | 1.73E−04 | 0.05489 | 0.737932 | 113,412,658 | A | C | 2888 |
| chr12: 113237275 | 1.73E−04 | −0.11057 | 0.0398 | 113,237,275 | C | T | 2889 |
| rs7301677 | 1.77E−04 | −0.044212 | 0.655658 | 113,865,530 | C | T | 2890 |
| rs7132327 | 1.77E−04 | 0.044212 | 0.344351 | 113,865,454 | C | T | 2891 |
| rs11067283 | 1.79E−04 | −0.04569 | 0.333909 | 113,680,274 | A | T | 2892 |
| rs55724378 | 1.81E−04 | −0.045192 | 0.569477 | 113,682,288 | A | C | 2893 |
| rs1920597 | 1.87E−04 | 0.041824 | 0.501774 | 113,188,475 | A | G | 2894 |
| chr12: 113264239 | 1.87E−04 | −0.111434 | 0.039341 | 113,264,239 | A | G | 2895 |
| rs1920596 | 1.98E−04 | −0.041593 | 0.497044 | 113,188,795 | A | T | 2896 |
| rs10850406 | 2.04E−04 | 0.043879 | 0.36438 | 113,852,223 | A | G | 2897 |
| rs10850381 | 2.07E−04 | 0.043804 | 0.646232 | 113,690,335 | G | T | 2898 |
| rs7966748 | 2.08E−04 | 0.045767 | 0.491781 | 113,856,605 | A | T | 2899 |
| rs7980129 | 2.17E−04 | 0.043419 | 0.352789 | 113,856,935 | G | T | 2900 |
| rs7966651 | 2.20E−04 | −0.043376 | 0.647102 | 113,856,341 | C | T | 2901 |
| rs10744836 | 2.22E−04 | −0.043345 | 0.647026 | 113,856,125 | G | T | 2902 |
| rs7311039 | 2.29E−04 | −0.04322 | 0.64673 | 113,855,591 | C | G | 2903 |
| rs4767282 | 2.30E−04 | 0.043205 | 0.353305 | 113,853,421 | C | G | 2904 |
| chr12: 113274919 | 2.30E−04 | −0.112154 | 0.039098 | 113,274,919 | A | C | 2905 |
| rs2384555 | 2.31E−04 | −0.043195 | 0.646673 | 113,852,040 | C | T | 2906 |
| rs1896356 | 2.31E−04 | 0.043192 | 0.353333 | 113,851,669 | C | T | 2907 |
| chr12: 113408476 | 2.31E−04 | −0.072643 | 0.088533 | 113,408,476 | A | G | 2908 |
| rs10850405 | 2.31E−04 | 0.043188 | 0.353343 | 113,851,052 | A | T | 2909 |
| rs10850404 | 2.31E−04 | −0.043185 | 0.646651 | 113,850,668 | G | T | 2910 |
| rs7980361 | 2.33E−04 | −0.043162 | 0.6466 | 113,847,494 | C | T | 2911 |
| rs7976673 | 2.33E−04 | 0.043151 | 0.353424 | 113,846,997 | A | T | 2912 |
| rs10444497 | 2.34E−04 | −0.043241 | 0.645207 | 113,855,029 | C | G | 2913 |
| rs4767239 | 2.35E−04 | −0.053278 | 0.798894 | 113,300,931 | C | G | 2914 |
| rs10774767 | 2.38E−04 | −0.04579 | 0.615057 | 113,660,418 | C | T | 2915 |
| chr12: 113315599 | 2.39E−04 | −0.363621 | 0.982587 | 113,315,599 | C | T | 2916 |
| rs9630280 | 2.40E−04 | −0.043113 | 0.646362 | 113,846,140 | C | T | 2917 |
| rs1896358 | 2.48E−04 | 0.043072 | 0.353846 | 113,845,574 | C | T | 2918 |
| rs10444496 | 2.57E−04 | −0.050502 | 0.748433 | 113,677,561 | C | T | 2919 |
| rs12582045 | 2.59E−04 | 0.071809 | 0.91072 | 113,410,458 | C | T | 2920 |
| rs7966951 | 2.59E−04 | 0.043086 | 0.344541 | 113,849,594 | A | G | 2921 |
| rs3914956 | 2.60E−04 | −0.043075 | 0.655445 | 113,848,134 | A | T | 2922 |
| rs7487962 | 2.66E−04 | 0.043029 | 0.344747 | 113,846,313 | A | G | 2923 |
| rs7132593 | 2.72E−04 | −0.043028 | 0.646446 | 113,845,249 | A | G | 2924 |
| rs6416327 | 2.74E−04 | −0.043001 | 0.65507 | 113,845,747 | G | T | 2925 |
| rs10507250 | 2.82E−04 | −0.074567 | 0.093037 | 113,380,179 | T | C | 2926 |
| rs10744824 | 2.94E−04 | −0.050879 | 0.799931 | 113,293,021 | A | G | 2927 |
| rs7312625 | 3.08E−04 | −0.044974 | 0.718133 | 113,284,357 | A | G | 284 |
| rs11067265 | 3.25E−04 | 0.043095 | 0.576768 | 113,651,372 | C | T | 2928 |
| rs2162320 | 3.67E−04 | −0.052608 | 0.806317 | 113,191,172 | C | T | 2929 |
| rs1920593 | 3.79E−04 | −0.048752 | 0.790005 | 113,189,926 | C | T | 2930 |
| rs11067278 | 3.96E−04 | 0.043651 | 0.339824 | 113,668,436 | C | G | 2931 |
| rs1920595 | 3.97E−04 | −0.048605 | 0.789669 | 113,189,705 | A | C | 2932 |
| rs10774768 | 4.12E−04 | −0.040966 | 0.489835 | 113,677,577 | C | T | 2933 |
| rs4767237 | 4.13E−04 | 0.044027 | 0.280263 | 113,285,196 | A | G | 285 |
| rs7132580 | 4.25E−04 | −0.041522 | 0.64212 | 113,845,207 | A | G | 2934 |
| rs7978143 | 4.33E−04 | 0.053319 | 0.823835 | 113,421,296 | A | G | 2935 |
| rs5015007 | 4.37E−04 | −0.050007 | 0.804004 | 113,289,466 | A | T | 2936 |
| rs1981946 | 4.45E−04 | −0.112171 | 0.954945 | 113,601,413 | G | T | 2937 |
| chr12: 113287381 | 4.52E−04 | −0.115028 | 0.061441 | 113,287,381 | G | T | 2938 |
| rs1061651 | 4.57E−04 | −0.048588 | 0.251604 | 113,592,744 | C | T | 2939 |
| rs2891537 | 4.64E−04 | −0.041174 | 0.640651 | 113,843,335 | G | T | 2940 |
| rs1566643 | 4.73E−04 | 0.041402 | 0.417741 | 113,690,703 | A | G | 2941 |
| rs10774769 | 4.74E−04 | 0.04622 | 0.265593 | 113,683,120 | C | T | 2942 |
| rs12580721 | 4.94E−04 | 0.042685 | 0.337349 | 113,672,623 | A | C | 2943 |
| rs7135659 | 4.98E−04 | −0.043109 | 0.716493 | 113,286,155 | A | G | 286 |
| rs1896330 | 5.09E−04 | −0.040865 | 0.640324 | 113,841,386 | A | G | 2944 |
| rs12578160 | 5.24E−04 | 0.04245 | 0.335906 | 113,672,317 | A | G | 2945 |
| rs7300371 | 5.48E−04 | −0.042988 | 0.643799 | 113,855,564 | C | T | 2946 |
| rs7487237 | 5.67E−04 | 0.04046 | 0.360065 | 113,838,086 | A | G | 2947 |
| rs17660551 | 5.70E−04 | −0.047318 | 0.787133 | 113,188,005 | A | C | 2948 |
| rs17660485 | 5.90E−04 | −0.047183 | 0.786898 | 113,187,497 | C | G | 2949 |
| rs4118382 | 6.06E−04 | −0.057905 | 0.246322 | 113,149,947 | A | T | 2950 |
| rs11067262 | 6.17E−04 | −0.05331 | 0.749534 | 113,646,809 | G | T | 2951 |
| rs1946293 | 6.32E−04 | −0.042299 | 0.717743 | 113,287,143 | A | G | 289 |
| rs10850401 | 6.33E−04 | 0.040119 | 0.359619 | 113,836,292 | A | C | 2952 |
| rs1896347 | 6.38E−04 | 0.040098 | 0.359594 | 113,836,177 | G | T | 2953 |
| rs7138015 | 6.41E−04 | 0.046862 | 0.213642 | 113,186,261 | A | C | 2954 |
| chr12: 113203749 | 6.60E−04 | −0.673327 | 0.991193 | 113,203,749 | C | T | 2955 |
| rs1895585 | 6.62E−04 | 0.042375 | 0.277734 | 113,286,521 | A | G | 287 |
| chr12: 113374127 | 6.63E−04 | 0.073194 | 0.91537 | 113,374,127 | C | G | 2956 |
| chr12: 112944886 | 6.93E−04 | −0.04865 | 0.352462 | 112,944,886 | A | G | 2957 |
| rs58562176 | 6.95E−04 | −0.046538 | 0.785834 | 113,185,837 | C | T | 2958 |
| rs1124477 | 7.14E−04 | −0.039753 | 0.641287 | 113,833,880 | C | T | 2959 |
| rs10774752 | 7.15E−04 | 0.048264 | 0.188509 | 113,252,695 | A | G | 2960 |
| rs7964836 | 7.25E−04 | −0.04821 | 0.811491 | 113,251,103 | C | G | 2961 |
| rs8181608 | 7.27E−04 | 0.048933 | 0.183954 | 113,245,966 | A | G | 259 |
| rs7307520 | 7.39E−04 | 0.048132 | 0.188515 | 113,249,082 | A | G | 2962 |
| chr12: 113384018 | 7.40E−04 | 0.067741 | 0.913276 | 113,384,018 | C | T | 2963 |
| rs4547150 | 7.41E−04 | −0.045359 | 0.648302 | 113,649,565 | C | T | 2964 |
| rs6489953 | 7.43E−04 | 0.048118 | 0.188781 | 113,249,145 | C | T | 264 |
| rs10744820 | 7.50E−04 | 0.048488 | 0.184141 | 113,252,510 | A | G | 265 |
| rs1895587 | 7.55E−04 | −0.048479 | 0.815854 | 113,253,912 | C | T | 266 |
| rs11067266 | 7.60E−04 | −0.048251 | 0.756596 | 113,651,827 | G | T | 2965 |
| rs6489952 | 7.70E−04 | −0.048943 | 0.81572 | 113,243,156 | A | G | 256 |
| rs1247937 | 7.70E−04 | −0.039367 | 0.5612 | 113,192,294 | A | T | 2966 |
| rs7965033 | 7.84E−04 | −0.048307 | 0.808474 | 113,295,738 | C | T | 2967 |
| rs58872758 | 7.92E−04 | −0.046121 | 0.784238 | 113,180,030 | G | T | 2968 |
| chr12: 113181795 | 7.94E−04 | −0.046028 | 0.784582 | 113,181,795 | A | G | 2969 |
| rs10744819 | 7.99E−04 | 0.048241 | 0.184162 | 113,246,213 | A | G | 263 |
| rs8181627 | 7.99E−04 | −0.048238 | 0.815838 | 113,246,147 | C | T | 262 |
| rs8181683 | 8.00E−04 | 0.048236 | 0.184162 | 113,246,101 | C | T | 261 |
| rs10744818 | 8.00E−04 | −0.048234 | 0.815838 | 113,246,068 | C | T | 260 |
| rs7966567 | 8.03E−04 | 0.048224 | 0.184183 | 113,245,863 | C | T | 258 |
| rs3825215 | 8.09E−04 | −0.04199 | 0.720456 | 113,289,281 | C | G | 290 |
| rs1895593 | 8.10E−04 | −0.048276 | 0.81561 | 113,245,198 | A | G | 257 |
| rs17660241 | 8.36E−04 | 0.046061 | 0.214841 | 113,179,284 | A | G | 2970 |
| rs12231030 | 8.36E−04 | −0.099409 | 0.044054 | 113,295,169 | C | T | 2971 |
| rs11067098 | 8.57E−04 | −0.105933 | 0.038052 | 113,315,145 | A | G | 2972 |
| rs1896312 | 8.61E−04 | 0.039085 | 0.357458 | 113,830,807 | C | T | 2973 |
| rs933748 | 8.70E−04 | 0.047106 | 0.205406 | 113,245,039 | C | T | 2974 |
| rs2113437 | 8.73E−04 | 0.106956 | 0.962308 | 113,316,323 | C | T | 2975 |
| chr12: 113399882 | 8.79E−04 | −0.12697 | 0.032387 | 113,399,882 | A | G | 2976 |
| rs1895582 | 9.27E−04 | −0.041496 | 0.723842 | 113,291,418 | A | G | 291 |
| rs2555014 | 9.79E−04 | −0.036767 | 0.522542 | 113,161,874 | G | T | 2977 |
| chr12: 112607206 | 9.83E−04 | 0.265452 | 0.007079 | 112,607,206 | A | G | 2978 |
| chr12: 113180727 | 9.94E−04 | −0.09687 | 0.928886 | 113,180,727 | C | T | 2979 |
| chr12: 113200986 | 9.97E−04 | 0.097513 | 0.067363 | 113,200,986 | A | G | 2980 |
| rs17660176 | 9.98E−04 | 0.070649 | 0.154323 | 113,177,009 | A | G | 2981 |
| rs6489990 | 1.01E−03 | −0.040006 | 0.686155 | 113,828,768 | A | T | 2982 |
| rs1265496 | 1.04E−03 | −0.036537 | 0.522738 | 113,161,366 | C | T | 2983 |
| chr12: 113370640 | 1.04E−03 | 0.072302 | 0.78792 | 113,370,640 | A | C | 2984 |
| rs1895583 | 1.09E−03 | 0.041041 | 0.275231 | 113,291,268 | A | G | 2985 |
| chr12: 113556849 | 1.10E−03 | −0.081071 | 0.147128 | 113,556,849 | G | T | 2986 |
| rs16943956 | 1.10E−03 | −0.095432 | 0.93096 | 113,195,145 | A | G | 2987 |
| chr12: 112699391 | 1.11E−03 | −0.058052 | 0.19542 | 112,699,391 | A | T | 2988 |
| rs60121244 | 1.16E−03 | −0.0404 | 0.646003 | 113,683,398 | G | T | 2989 |
| rs10850346 | 1.19E−03 | −0.050954 | 0.146671 | 113,414,173 | C | T | 2990 |
| rs1270886 | 1.20E−03 | 0.036206 | 0.478379 | 113,160,853 | C | T | 2991 |
| rs16942762 | 1.23E−03 | 0.090859 | 0.068857 | 112,286,477 | A | G | 2992 |
| rs4639978 | 1.24E−03 | −0.044593 | 0.435705 | 114,210,500 | C | T | 2993 |
| rs12820329 | 1.25E−03 | −0.129388 | 0.961062 | 113,565,734 | A | C | 2994 |
| rs10850315 | 1.25E−03 | 0.0401 | 0.2758 | 113,251,118 | G | T | 2995 |
| rs4767255 | 1.26E−03 | −0.039128 | 0.63601 | 113,682,875 | C | G | 2996 |
| rs35383422 | 1.26E−03 | 0.045458 | 0.757185 | 113,576,401 | A | T | 2997 |
| chr12: 113808679 | 1.29E−03 | 0.103476 | 0.03599 | 113,808,679 | C | T | 2998 |
| rs10507249 | 1.30E−03 | 0.06255 | 0.893065 | 113,375,644 | C | G | 2999 |
| rs4767254 | 1.33E−03 | 0.038911 | 0.364132 | 113,682,775 | A | G | 3000 |
| rs11831276 | 1.39E−03 | −0.040582 | 0.643325 | 113,683,258 | G | T | 3001 |
| rs11067228 | 1.40E−03 | 0.036129 | 0.559691 | 113,578,643 | A | G | 3002 |
| rs4767236 | 1.45E−03 | 0.046046 | 0.185644 | 113,221,039 | A | G | 3003 |
| rs1078568 | 1.48E−03 | −0.045947 | 0.814344 | 113,220,504 | A | G | 3004 |
| rs10850370 | 1.48E−03 | 0.041849 | 0.359097 | 113,648,796 | A | G | 3005 |
| rs1078567 | 1.48E−03 | −0.045914 | 0.814344 | 113,220,355 | A | G | 3006 |
| rs4259873 | 1.50E−03 | −0.045856 | 0.814508 | 113,219,162 | C | T | 3007 |
| rs4556590 | 1.51E−03 | 0.045793 | 0.185657 | 113,219,302 | C | T | 3008 |
| rs4625524 | 1.52E−03 | −0.040231 | 0.680313 | 113,828,468 | A | G | 3009 |
| chr12: 113217529 | 1.53E−03 | −0.119633 | 0.02923 | 113,217,529 | C | T | 3010 |
| rs4540867 | 1.53E−03 | 0.045706 | 0.185657 | 113,218,077 | A | G | 3011 |
| rs753564 | 1.54E−03 | −0.045654 | 0.814343 | 113,217,328 | C | G | 3012 |
| rs12314827 | 1.58E−03 | −0.053328 | 0.260219 | 113,652,520 | A | G | 3013 |
| chr12: 113198160 | 1.61E−03 | −0.044145 | 0.799802 | 113,198,160 | C | T | 3014 |
| rs11067264 | 1.62E−03 | 0.04146 | 0.357983 | 113,648,407 | A | G | 3015 |
| rs4766728 | 1.62E−03 | 0.044074 | 0.199688 | 113,199,628 | C | T | 3016 |
| rs7132243 | 1.62E−03 | 0.044066 | 0.199599 | 113,202,664 | C | T | 3017 |
| chr12: 113562516 | 1.63E−03 | −0.080255 | 0.069418 | 113,562,516 | C | T | 3018 |
| rs7959283 | 1.63E−03 | 0.036599 | 0.365759 | 113,854,921 | A | T | 3019 |
| chr12: 113198279 | 1.63E−03 | −0.044035 | 0.80049 | 113,198,279 | A | C | 3020 |
| rs4122458 | 1.65E−03 | −0.036546 | 0.634149 | 113,848,337 | G | T | 3021 |
| rs60302750 | 1.65E−03 | 0.045191 | 0.185243 | 113,209,985 | A | G | 3022 |
| rs11067327 | 1.66E−03 | 0.036542 | 0.365858 | 113,847,826 | C | T | 3023 |
| rs7977151 | 1.66E−03 | 0.036537 | 0.365866 | 113,847,355 | A | G | 3024 |
| rs7979724 | 1.66E−03 | −0.036525 | 0.634113 | 113,846,967 | C | T | 3025 |
| rs2384554 | 1.67E−03 | −0.0365 | 0.63407 | 113,846,661 | G | T | 3026 |
| rs60029182 | 1.69E−03 | −0.045608 | 0.815531 | 113,227,756 | G | T | 3027 |
| chr12: 112655298 | 1.73E−03 | 0.377452 | 0.995095 | 112,655,298 | C | T | 3028 |
| chr12: 113375025 | 1.76E−03 | −0.064906 | 0.093572 | 113,375,025 | C | T | 3029 |
| rs57797354 | 1.79E−03 | 0.046704 | 0.171614 | 113,211,534 | C | T | 3030 |
| rs6489974 | 1.79E−03 | 0.03804 | 0.574558 | 113,640,913 | A | G | 3031 |
| rs1247926 | 1.79E−03 | 0.034777 | 0.492781 | 113,171,694 | C | T | 3032 |
| rs1976426 | 1.83E−03 | 0.037314 | 0.372629 | 113,688,911 | C | G | 3033 |
| chr12: 113009556 | 1.85E−03 | −0.137542 | 0.018095 | 113,009,556 | A | G | 3034 |
| rs1247927 | 1.86E−03 | 0.034665 | 0.492766 | 113,171,439 | C | T | 3035 |
| rs11067145 | 1.86E−03 | 0.048497 | 0.848802 | 113,417,288 | G | T | 3036 |
| rs2428243 | 1.89E−03 | 0.042594 | 0.270829 | 114,201,808 | C | T | 3037 |
| rs1247932 | 1.90E−03 | 0.044511 | 0.353284 | 113,177,514 | A | G | 3038 |
| rs60740080 | 1.90E−03 | −0.06875 | 0.077383 | 113,375,919 | C | G | 3039 |
| chr12: 113096076 | 1.90E−03 | 0.154969 | 0.985796 | 113,096,076 | A | T | 3040 |
| rs11067054 | 1.91E−03 | 0.048417 | 0.16855 | 113,256,940 | A | G | 3041 |
| rs1247928 | 1.92E−03 | 0.03457 | 0.492755 | 113,171,223 | C | T | 3042 |
| rs34474591 | 1.94E−03 | −0.087272 | 0.936175 | 112,299,900 | G | T | 3043 |
| rs34750359 | 1.95E−03 | 0.087222 | 0.063762 | 112,295,216 | C | T | 3044 |
| chr12: 113211476 | 1.95E−03 | 0.083888 | 0.105731 | 113,211,476 | A | G | 3045 |
| rs34340397 | 1.95E−03 | −0.087224 | 0.936202 | 112,297,447 | C | T | 3046 |
| rs71465900 | 1.96E−03 | −0.087158 | 0.93618 | 112,294,491 | A | G | 3047 |
| rs34863464 | 1.96E−03 | −0.087111 | 0.936184 | 112,282,616 | C | T | 3048 |
| rs35526182 | 1.96E−03 | −0.087129 | 0.936299 | 112,293,612 | A | G | 3049 |
| rs71465901 | 1.96E−03 | 0.08716 | 0.063703 | 112,297,266 | A | G | 3050 |
| rs1896018 | 1.96E−03 | −0.044598 | 0.815754 | 113,215,780 | A | G | 3051 |
| rs12824200 | 1.97E−03 | −0.087105 | 0.936239 | 112,293,645 | A | G | 3052 |
| chr12: 112290765 | 1.97E−03 | −0.08709 | 0.936344 | 112,290,765 | C | T | 3053 |
| rs12820985 | 1.97E−03 | −0.087045 | 0.933705 | 112,281,239 | A | C | 3054 |
| rs34991985 | 1.97E−03 | 0.087065 | 0.063662 | 112,290,476 | A | G | 3055 |
| rs35435518 | 1.98E−03 | −0.087823 | 0.936043 | 112,285,473 | A | G | 3056 |
| rs34593969 | 1.98E−03 | 0.087023 | 0.06374 | 112,286,571 | A | G | 3057 |
| rs1896016 | 1.99E−03 | 0.044477 | 0.184476 | 113,215,558 | C | T | 3058 |
| rs9668121 | 1.99E−03 | 0.086976 | 0.063688 | 112,283,095 | C | T | 3059 |
| rs1896015 | 1.99E−03 | 0.044472 | 0.184476 | 113,215,473 | A | T | 3060 |
| rs12815547 | 2.00E−03 | 0.086968 | 0.063729 | 112,284,300 | A | G | 3061 |
| rs71465902 | 2.00E−03 | −0.08706 | 0.935418 | 112,298,396 | A | G | 3062 |
| rs7973232 | 2.00E−03 | −0.086944 | 0.936313 | 112,282,788 | A | G | 3063 |
| rs7974117 | 2.00E−03 | −0.087647 | 0.936625 | 112,292,288 | C | T | 3064 |
| rs4261334 | 2.01E−03 | −0.044425 | 0.815524 | 113,214,723 | A | C | 3065 |
| rs4274232 | 2.01E−03 | 0.044417 | 0.184476 | 113,214,598 | C | T | 3066 |
| rs59777856 | 2.01E−03 | −0.044405 | 0.815591 | 113,213,862 | G | T | 3067 |
| rs71442754 | 2.02E−03 | 0.087418 | 0.063431 | 112,289,996 | G | T | 3068 |
| chr12: 113213806 | 2.02E−03 | −0.04437 | 0.815523 | 113,213,806 | A | G | 3069 |
| rs35586551 | 2.03E−03 | −0.086928 | 0.935016 | 112,293,845 | C | T | 3070 |
| rs55870641 | 2.03E−03 | 0.043102 | 0.198275 | 113,206,637 | C | T | 3071 |
| rs60772998 | 2.03E−03 | 0.044339 | 0.184466 | 113,213,250 | A | G | 3072 |
| chr12: 113212688 | 2.04E−03 | 0.044318 | 0.184456 | 113,212,688 | A | G | 3073 |
| chr12: 113204921 | 2.04E−03 | 0.043075 | 0.198265 | 113,204,921 | C | T | 3074 |
| chr12: 113204801 | 2.04E−03 | −0.043074 | 0.801735 | 113,204,801 | G | T | 3075 |
| rs60268458 | 2.04E−03 | −0.044308 | 0.815552 | 113,212,437 | A | C | 3076 |
| rs6489949 | 2.04E−03 | −0.043067 | 0.801738 | 113,202,536 | C | T | 3077 |
| rs34114640 | 2.04E−03 | 0.08688 | 0.065639 | 112,285,185 | C | T | 3078 |
| rs58412031 | 2.04E−03 | −0.043059 | 0.801741 | 113,199,493 | C | T | 3079 |
| rs1896014 | 2.08E−03 | 0.044196 | 0.184363 | 113,209,532 | A | G | 3080 |
| chr12: 113205016 | 2.08E−03 | 0.043082 | 0.197894 | 113,205,016 | A | G | 3081 |
| rs1896013 | 2.08E−03 | −0.044193 | 0.815639 | 113,209,450 | C | T | 3082 |
| rs1896012 | 2.08E−03 | 0.044192 | 0.18436 | 113,209,430 | C | T | 3083 |
| chr12: 113208133 | 2.11E−03 | −0.044123 | 0.815691 | 113,208,133 | A | T | 3084 |
| rs1955105 | 2.15E−03 | 0.0363 | 0.369981 | 113,829,165 | A | C | 3085 |
| rs4766741 | 2.20E−03 | 0.038223 | 0.648681 | 113,736,448 | C | G | 3086 |
| rs7301743 | 2.20E−03 | −0.036862 | 0.666866 | 113,828,944 | A | G | 3087 |
| chr12: 112944888 | 2.23E−03 | −0.049921 | 0.283068 | 112,944,888 | A | G | 3088 |
| rs17730547 | 2.24E−03 | 0.086305 | 0.95601 | 113,294,816 | A | C | 3089 |
| rs9669457 | 2.28E−03 | 0.040561 | 0.252844 | 113,260,665 | A | G | 267 |
| rs2253207 | 2.31E−03 | 0.033978 | 0.49268 | 113,169,820 | C | T | 3090 |
| chr12: 112454831 | 2.31E−03 | −0.367114 | 0.012141 | 112,454,831 | A | G | 3091 |
| rs1269789 | 2.35E−03 | 0.033926 | 0.492676 | 113,168,925 | C | T | 3092 |
| rs34388546 | 2.36E−03 | −0.039412 | 0.752233 | 113,167,597 | C | T | 3093 |
| rs1247938 | 2.39E−03 | 0.033869 | 0.49267 | 113,167,951 | A | G | 3094 |
| rs2252923 | 2.40E−03 | −0.033858 | 0.507334 | 113,167,703 | A | G | 3095 |
| rs2252924 | 2.40E−03 | 0.033857 | 0.492669 | 113,167,706 | A | C | 3096 |
| rs1247940 | 2.42E−03 | 0.033828 | 0.492666 | 113,167,034 | C | T | 3097 |
| rs73195096 | 2.44E−03 | −0.068472 | 0.086672 | 113,560,746 | G | T | 3098 |
| rs17676517 | 2.45E−03 | −0.061505 | 0.102807 | 113,372,692 | A | G | 3099 |
| rs1270885 | 2.47E−03 | −0.033763 | 0.507343 | 113,165,935 | A | G | 3100 |
| rs11067013 | 2.47E−03 | −0.039229 | 0.752236 | 113,165,410 | C | T | 3101 |
| rs10850403 | 2.49E−03 | −0.035085 | 0.619871 | 113,844,976 | C | T | 3102 |
| rs2701104 | 2.50E−03 | 0.035926 | 0.347812 | 113,188,039 | C | G | 3103 |
| rs12826247 | 2.59E−03 | 0.084699 | 0.065377 | 112,281,254 | G | T | 3104 |
| rs4766724 | 2.61E−03 | −0.040484 | 0.759374 | 113,092,421 | G | T | 3105 |
| rs7302926 | 2.66E−03 | −0.047583 | 0.173382 | 113,572,696 | C | T | 3106 |
| rs7967168 | 2.75E−03 | −0.034751 | 0.619504 | 113,843,589 | A | T | 3107 |
| chr12: 113179810 | 2.77E−03 | −0.309892 | 0.009514 | 113,179,810 | A | G | 3108 |
| rs2252414 | 2.79E−03 | 0.033351 | 0.49261 | 113,163,520 | A | G | 3109 |
| chr12: 112992048 | 2.80E−03 | 0.053073 | 0.117025 | 112,992,048 | A | G | 3110 |
| rs7980132 | 2.86E−03 | −0.038643 | 0.752337 | 113,163,056 | A | G | 3111 |
| rs16945315 | 2.86E−03 | 0.04065 | 0.227124 | 114,177,896 | A | G | 3112 |
| rs2555012 | 2.86E−03 | −0.03327 | 0.507465 | 113,163,108 | C | T | 3113 |
| rs2384552 | 2.88E−03 | 0.034578 | 0.380914 | 113,842,311 | A | G | 3114 |
| rs7972037 | 2.93E−03 | −0.035295 | 0.622833 | 113,854,909 | A | G | 3115 |
| chr12: 113850412 | 2.94E−03 | 0.036969 | 0.470248 | 113,850,412 | G | T | 3116 |
| rs7977369 | 2.95E−03 | −0.041605 | 0.799173 | 113,196,032 | C | T | 3117 |
| rs34888765 | 2.99E−03 | −0.082407 | 0.931539 | 112,298,867 | C | T | 3118 |
| rs1896329 | 3.01E−03 | 0.034425 | 0.380801 | 113,841,815 | C | T | 3119 |
| chr12: 113184391 | 3.02E−03 | −0.401927 | 0.008685 | 113,184,391 | C | T | 3120 |
| rs7306365 | 3.05E−03 | −0.036345 | 0.356827 | 112,954,373 | C | T | 3121 |
| rs1634149 | 3.09E−03 | 0.035243 | 0.346159 | 114,220,633 | C | T | 3122 |
| chr12: 113637935 | 3.13E−03 | −0.103347 | 0.968071 | 113,637,935 | G | T | 3123 |
| rs61928007 | 3.19E−03 | 0.072257 | 0.922843 | 114,034,895 | C | G | 3124 |
| chr12: 113219987 | 3.20E−03 | 0.042596 | 0.192844 | 113,219,987 | A | C | 3125 |
| chr12: 113186300 | 3.30E−03 | −0.381034 | 0.008961 | 113,186,300 | C | G | 3126 |
| rs4007267 | 3.31E−03 | −0.033369 | 0.522181 | 113,170,051 | A | T | 3127 |
| rs1732589 | 3.33E−03 | −0.0355 | 0.636913 | 114,213,421 | A | G | 3128 |
| chr12: 113557673 | 3.42E−03 | −0.04215 | 0.350636 | 113,557,673 | C | T | 3129 |
| rs873619 | 3.46E−03 | 0.038 | 0.695314 | 112,433,331 | A | C | 3130 |
| rs6489971 | 3.47E−03 | −0.040327 | 0.676737 | 113,636,006 | A | C | 3131 |
| rs11067307 | 3.50E−03 | −0.035287 | 0.464531 | 113,737,049 | C | T | 3132 |
| rs4766729 | 3.62E−03 | 0.041459 | 0.190868 | 113,214,255 | C | G | 3133 |
| chr12: 112682300 | 3.63E−03 | −1.575746 | 0.998811 | 112,682,300 | G | T | 3134 |
| rs2016045 | 3.66E−03 | −0.045209 | 0.783388 | 113,244,750 | A | T | 3135 |
| chr12: 113575316 | 3.69E−03 | 0.056696 | 0.730889 | 113,575,316 | G | T | 3136 |
| rs4766748 | 3.71E−03 | 0.03379 | 0.372258 | 113,838,562 | C | T | 3137 |
| chr12: 112468389 | 3.72E−03 | 0.548984 | 0.992532 | 112,468,389 | G | T | 3138 |
| rs7484657 | 3.75E−03 | 0.033738 | 0.37233 | 113,838,184 | C | T | 3139 |
| rs1732587 | 3.77E−03 | −0.034623 | 0.66244 | 114,220,761 | A | T | 3140 |
| rs34086925 | 3.83E−03 | 0.03855 | 0.328092 | 113,631,575 | C | T | 3141 |
| chr12: 113202737 | 3.83E−03 | 0.12765 | 0.038218 | 113,202,737 | A | G | 3142 |
| chr12: 112511570 | 3.89E−03 | −0.226443 | 0.009274 | 112,511,570 | C | T | 3143 |
| chr12: 112642481 | 3.99E−03 | −0.213403 | 0.990911 | 112,642,481 | C | T | 3144 |
| rs10744808 | 4.01E−03 | 0.037575 | 0.72037 | 113,036,293 | C | T | 3145 |
| chr12: 113194781 | 4.05E−03 | 0.355325 | 0.990991 | 113,194,781 | C | T | 3146 |
| rs16945140 | 4.06E−03 | −0.065331 | 0.065867 | 114,114,382 | C | T | 3147 |
| rs11609105 | 4.12E−03 | 0.03991 | 0.705504 | 113,586,865 | A | C | 3148 |
| chr12: 113229262 | 4.12E−03 | 0.220899 | 0.020002 | 113,229,262 | A | T | 3149 |
| rs12812747 | 4.26E−03 | 0.033385 | 0.627824 | 113,859,041 | A | G | 3150 |
| chr12: 113215006 | 4.33E−03 | 0.355226 | 0.99126 | 113,215,006 | C | T | 3151 |
| rs35514224 | 4.35E−03 | −0.033321 | 0.371508 | 113,857,662 | C | T | 3152 |
| rs2384556 | 4.40E−03 | −0.033242 | 0.371686 | 113,858,464 | G | T | 3153 |
| rs1896000 | 4.41E−03 | 0.034997 | 0.688649 | 113,212,961 | C | T | 3154 |
| rs11609455 | 4.43E−03 | 0.059049 | 0.154326 | 112,323,664 | A | C | 3155 |
| rs2217171 | 4.44E−03 | −0.033195 | 0.371374 | 113,857,935 | C | T | 3156 |
| rs12313095 | 4.46E−03 | −0.03467 | 0.403323 | 112,931,243 | A | G | 3157 |
| chr12: 112372775 | 4.50E−03 | 0.07368 | 0.234878 | 112,372,775 | A | C | 3158 |
| rs1896354 | 4.52E−03 | 0.033127 | 0.629139 | 113,857,348 | A | G | 3159 |
| rs759928 | 4.53E−03 | 0.038146 | 0.229675 | 113,094,894 | A | G | 3160 |
| rs7972041 | 4.54E−03 | −0.033897 | 0.616417 | 113,854,923 | A | G | 3161 |
| chr12: 113331181 | 4.54E−03 | 0.25804 | 0.005904 | 113,331,181 | A | G | 3162 |
| rs71467958 | 4.54E−03 | 0.038122 | 0.229688 | 113,095,188 | A | T | 3163 |
| rs4766727 | 4.57E−03 | 0.036018 | 0.261963 | 113,152,155 | C | G | 3164 |
| rs4766726 | 4.57E−03 | −0.036013 | 0.738014 | 113,152,122 | A | G | 3165 |
| rs1920948 | 4.58E−03 | 0.038337 | 0.215992 | 114,181,816 | A | G | 3166 |
| rs1920949 | 4.59E−03 | 0.038333 | 0.216015 | 114,181,565 | A | G | 3167 |
| chr12: 113394183 | 4.64E−03 | −0.071758 | 0.05537 | 113,394,183 | C | T | 3168 |
| rs4767232 | 4.75E−03 | −0.037887 | 0.770088 | 113,097,369 | G | T | 3169 |
| rs1155698 | 4.76E−03 | −0.034572 | 0.69916 | 114,195,031 | A | G | 3170 |
| chr12: 113193213 | 4.78E−03 | 0.451736 | 0.011129 | 113,193,213 | G | T | 3171 |
| rs1566646 | 4.82E−03 | 0.039476 | 0.773238 | 113,601,412 | G | T | 3172 |
| rs35715782 | 4.84E−03 | −0.034197 | 0.35286 | 113,857,692 | G | T | 3173 |
| rs1896002 | 4.93E−03 | 0.031627 | 0.510878 | 113,271,748 | A | C | 3174 |
| chr12: 112418434 | 4.94E−03 | 0.122361 | 0.065966 | 112,418,434 | G | T | 3175 |
| rs7296636 | 5.03E−03 | 0.038021 | 0.217508 | 114,178,676 | C | T | 3176 |
| rs11066975 | 5.12E−03 | 0.037394 | 0.229839 | 113,100,293 | A | G | 3177 |
| chr12: 114178455 | 5.12E−03 | −0.037957 | 0.782228 | 114,178,455 | C | T | 3178 |
| rs1248054 | 5.15E−03 | 0.040369 | 0.188486 | 113,335,534 | A | G | 3179 |
| rs2016047 | 5.17E−03 | −0.043217 | 0.777817 | 113,244,799 | G | T | 3180 |
| rs61928226 | 5.23E−03 | −0.037877 | 0.781917 | 114,178,194 | A | G | 3181 |
| rs16944707 | 5.23E−03 | 0.034502 | 0.705601 | 113,829,779 | C | G | 3182 |
| rs4767277 | 5.23E−03 | −0.034494 | 0.294526 | 113,830,279 | C | T | 3183 |
| chr12: 113202956 | 5.23E−03 | −0.115504 | 0.956652 | 113,202,956 | A | G | 3184 |
| rs4767278 | 5.24E−03 | 0.034492 | 0.705492 | 113,830,361 | C | G | 3185 |
| chr12: 114167248 | 5.27E−03 | 0.129598 | 0.980372 | 114,167,248 | C | G | 3186 |
| rs2125439 | 5.30E−03 | 0.038513 | 0.789759 | 112,958,281 | C | T | 3187 |
| chr12: 112280156 | 5.33E−03 | −0.086417 | 0.94159 | 112,280,156 | A | G | 3188 |
| chr12: 114040814 | 5.33E−03 | 0.188646 | 0.986913 | 114,040,814 | A | G | 3189 |
| rs1920594 | 5.38E−03 | −0.032271 | 0.623233 | 113,189,770 | C | G | 3190 |
| rs11067515 | 5.40E−03 | 0.032674 | 0.413298 | 114,212,015 | A | G | 3191 |
| chr12: 113333272 | 5.43E−03 | 0.374321 | 0.995492 | 113,333,272 | C | T | 3192 |
| chr12: 112987754 | 5.46E−03 | −0.049663 | 0.883368 | 112,987,754 | C | G | 3193 |
| rs11066980 | 5.46E−03 | 0.036338 | 0.237664 | 113,116,454 | A | G | 3194 |
| chr12: 113482681 | 5.51E−03 | 0.378105 | 0.99759 | 113,482,681 | C | T | 3195 |
| chr12: 112374980 | 5.59E−03 | 0.410257 | 0.991056 | 112,374,980 | C | T | 3196 |
| rs1248051 | 5.61E−03 | −0.039636 | 0.811002 | 113,339,312 | C | T | 3197 |
| rs6489968 | 5.66E−03 | −0.048467 | 0.825689 | 113,623,027 | A | G | 3198 |
| chr12: 113256876 | 5.70E−03 | 0.313909 | 0.990224 | 113,256,876 | C | T | 3199 |
| rs57155932 | 5.74E−03 | −0.039149 | 0.74495 | 113,211,470 | A | G | 3200 |
| rs898078 | 5.84E−03 | −0.033843 | 0.340578 | 112,947,970 | A | G | 3201 |
| rs11067508 | 5.93E−03 | −0.038227 | 0.780732 | 114,189,295 | A | T | 3202 |
| rs11832974 | 5.95E−03 | 0.069697 | 0.898906 | 112,530,277 | A | C | 3203 |
| rs12830928 | 5.96E−03 | −0.038312 | 0.257593 | 113,737,018 | A | G | 3204 |
| rs7309382 | 6.09E−03 | −0.032197 | 0.365942 | 113,850,565 | C | T | 3205 |
| chr12: 112488054 | 6.17E−03 | −0.205131 | 0.009159 | 112,488,054 | C | G | 3206 |
| rs12426457 | 6.18E−03 | −0.052662 | 0.215451 | 112,733,093 | A | G | 3207 |
| rs1061657 | 6.28E−03 | −0.037776 | 0.251718 | 113,592,519 | C | T | 3208 |
| chr12: 113943019 | 6.34E−03 | 0.351064 | 0.991292 | 113,943,019 | C | G | 3209 |
| rs11067036 | 6.48E−03 | −0.033305 | 0.31949 | 113,231,290 | C | T | 3210 |
| rs763824 | 6.50E−03 | 0.033556 | 0.705919 | 113,053,870 | A | G | 3211 |
| rs1001562 | 6.55E−03 | 0.033528 | 0.70594 | 113,058,173 | C | T | 3212 |
| rs2114866 | 6.55E−03 | 0.033527 | 0.70594 | 113,059,717 | C | G | 3213 |
| rs1634144 | 6.55E−03 | −0.031345 | 0.605914 | 114,214,175 | C | G | 3214 |
| rs1732590 | 6.56E−03 | 0.031344 | 0.394088 | 114,214,047 | A | G | 3215 |
| rs1634145 | 6.56E−03 | −0.031342 | 0.60594 | 114,214,386 | C | T | 3216 |
| rs1732592 | 6.61E−03 | −0.031321 | 0.606159 | 114,215,112 | A | G | 3217 |
| rs1882113 | 6.61E−03 | −0.033492 | 0.294193 | 113,052,199 | C | G | 3218 |
| rs1732593 | 6.61E−03 | 0.031319 | 0.393821 | 114,215,171 | A | G | 3219 |
| rs1634146 | 6.62E−03 | −0.031318 | 0.606195 | 114,215,218 | C | T | 3220 |
| rs7305509 | 6.62E−03 | 0.033485 | 0.705969 | 113,064,459 | A | G | 3221 |
| rs971870 | 6.66E−03 | −0.033461 | 0.294242 | 113,049,846 | A | G | 3222 |
| rs7298119 | 6.70E−03 | −0.065142 | 0.934548 | 113,564,175 | G | T | 3223 |
| rs12581666 | 6.74E−03 | −0.034857 | 0.282185 | 113,836,056 | C | T | 3224 |
| rs12832663 | 6.77E−03 | 0.037564 | 0.236313 | 113,099,855 | A | G | 3225 |
| chr12: 113569675 | 6.77E−03 | −0.119198 | 0.026238 | 113,569,675 | A | G | 3226 |
| chr12: 112531394 | 6.79E−03 | 0.06463 | 0.901994 | 112,531,394 | A | C | 3227 |
| rs4767231 | 6.81E−03 | 0.033569 | 0.706467 | 113,083,996 | A | G | 3228 |
| rs4767230 | 6.82E−03 | 0.033565 | 0.70649 | 113,083,644 | G | T | 3229 |
| rs7962531 | 6.85E−03 | 0.059306 | 0.071774 | 113,553,548 | C | T | 3230 |
| chr12: 112413804 | 6.89E−03 | 0.272093 | 0.986736 | 112,413,804 | A | G | 3231 |
| chr12: 114082036 | 6.99E−03 | −0.352625 | 0.005576 | 114,082,036 | A | T | 3232 |
| rs61931193 | 7.09E−03 | −0.032284 | 0.332147 | 113,695,844 | A | G | 3233 |
| chr12: 113287380 | 7.10E−03 | 0.070946 | 0.908922 | 113,287,380 | G | T | 3234 |
| chr12: 113576118 | 7.24E−03 | 0.072505 | 0.057179 | 113,576,118 | A | T | 3235 |
| chr12: 113556660 | 7.29E−03 | −0.059512 | 0.077719 | 113,556,660 | C | T | 3236 |
| rs73392140 | 7.33E−03 | −0.044305 | 0.289885 | 113,852,371 | C | T | 3237 |
| rs1465548 | 7.35E−03 | 0.034461 | 0.257969 | 113,141,212 | C | T | 3238 |
| chr12: 113929459 | 7.37E−03 | 0.517474 | 0.989102 | 113,929,459 | C | T | 3239 |
| chr12: 113616754 | 7.38E−03 | 0.093777 | 0.046599 | 113,616,754 | C | G | 3240 |
| chr12: 113241559 | 7.43E−03 | 0.160348 | 0.985956 | 113,241,559 | A | G | 3241 |
| rs11067402 | 7.44E−03 | −0.033166 | 0.714747 | 114,010,350 | A | G | 3242 |
| rs11067403 | 7.44E−03 | 0.033166 | 0.285251 | 114,010,367 | C | T | 3243 |
| rs11067217 | 7.44E−03 | 0.064629 | 0.065575 | 113,566,577 | C | T | 3244 |
| rs10850382 | 7.46E−03 | 0.031915 | 0.665792 | 113,698,931 | C | T | 3245 |
| rs4766752 | 7.47E−03 | −0.033144 | 0.714601 | 114,009,188 | C | T | 3246 |
| rs12581446 | 7.48E−03 | 0.033173 | 0.2851 | 114,010,692 | G | T | 3247 |
| chr12: 113547915 | 7.50E−03 | −0.058665 | 0.928038 | 113,547,915 | A | C | 3248 |
| rs7953486 | 7.56E−03 | −0.033181 | 0.715168 | 114,011,130 | C | T | 3249 |
| rs7967452 | 7.63E−03 | 0.033185 | 0.284636 | 114,011,588 | C | T | 3250 |
| rs1896001 | 7.63E−03 | 0.035078 | 0.699411 | 113,213,388 | C | T | 3251 |
| rs35569752 | 7.67E−03 | 0.078963 | 0.932331 | 114,041,599 | A | T | 3252 |
| chr12: 112435543 | 7.69E−03 | 0.35346 | 0.990075 | 112,435,543 | A | T | 3253 |
| rs4767256 | 7.70E−03 | 0.031817 | 0.66586 | 113,698,467 | C | T | 3254 |
| chr12: 113568742 | 7.70E−03 | 0.064154 | 0.066246 | 113,568,742 | A | G | 3255 |
| rs73400661 | 7.77E−03 | −0.058409 | 0.92797 | 113,546,449 | C | T | 3256 |
| rs12820517 | 7.78E−03 | 0.051769 | 0.902705 | 114,039,948 | C | T | 3257 |
| rs10850383 | 7.80E−03 | 0.031722 | 0.665794 | 113,699,301 | C | T | 3258 |
| rs2042849 | 7.83E−03 | −0.058698 | 0.925109 | 113,532,778 | C | T | 3259 |
| rs34627348 | 7.85E−03 | −0.118787 | 0.026355 | 113,601,720 | A | G | 3260 |
| rs60450122 | 7.86E−03 | −0.064349 | 0.933815 | 113,570,360 | A | G | 3261 |
| chr12: 113295165 | 7.93E−03 | −0.075389 | 0.046633 | 113,295,165 | C | T | 3262 |
| rs838327 | 7.95E−03 | 0.039245 | 0.793948 | 113,423,671 | A | G | 3263 |
| chr12: 113288017 | 7.95E−03 | −0.06071 | 0.103662 | 113,288,017 | A | C | 3264 |
| rs58768025 | 7.95E−03 | −0.057966 | 0.92513 | 113,535,163 | A | G | 3265 |
| rs2295233 | 7.96E−03 | 0.070707 | 0.943444 | 113,335,449 | C | T | 3266 |
| rs1563697 | 7.97E−03 | −0.031644 | 0.401944 | 112,933,180 | C | G | 3267 |
| rs73196908 | 7.99E−03 | 0.126582 | 0.973768 | 113,571,190 | A | G | 3268 |
| rs2019085 | 8.01E−03 | −0.058319 | 0.923796 | 113,532,714 | A | G | 3269 |
| rs11067002 | 8.02E−03 | 0.030139 | 0.418644 | 113,151,429 | A | T | 3270 |
| chr12: 113534904 | 8.05E−03 | 0.058026 | 0.075019 | 113,534,904 | A | T | 3271 |
| rs7961277 | 8.08E−03 | −0.031535 | 0.54415 | 113,298,462 | C | T | 3272 |
| rs12316683 | 8.12E−03 | −0.058069 | 0.924871 | 113,534,705 | C | T | 3273 |
| rs7968359 | 8.16E−03 | 0.03262 | 0.704555 | 113,045,972 | A | G | 3274 |
| rs73400615 | 8.16E−03 | 0.058127 | 0.075212 | 113,533,516 | A | G | 3275 |
| rs11067204 | 8.17E−03 | −0.058099 | 0.924789 | 113,534,431 | A | G | 3276 |
| rs11067205 | 8.17E−03 | −0.058095 | 0.924785 | 113,534,551 | C | T | 3277 |
| rs7978298 | 8.17E−03 | 0.058187 | 0.075137 | 113,533,149 | C | T | 3278 |
| rs12581626 | 8.17E−03 | −0.0581 | 0.924787 | 113,534,238 | C | G | 3279 |
| rs73400617 | 8.18E−03 | 0.058119 | 0.075205 | 113,533,559 | A | T | 3280 |
| rs7975100 | 8.18E−03 | −0.058103 | 0.92477 | 113,533,103 | A | C | 3281 |
| rs2042850 | 8.19E−03 | −0.058104 | 0.924758 | 113,532,557 | C | T | 3282 |
| chr12: 113532061 | 8.19E−03 | 0.058109 | 0.075237 | 113,532,061 | A | G | 3283 |
| rs12310902 | 8.19E−03 | −0.05811 | 0.924759 | 113,531,655 | C | T | 3284 |
| rs12309487 | 8.19E−03 | −0.058111 | 0.924757 | 113,531,476 | C | G | 3285 |
| rs12309422 | 8.19E−03 | −0.058111 | 0.924755 | 113,531,351 | C | G | 3286 |
| rs12309421 | 8.19E−03 | −0.058111 | 0.924755 | 113,531,346 | C | G | 3287 |
| rs12322489 | 8.19E−03 | 0.058112 | 0.075245 | 113,531,324 | C | G | 3288 |
| rs2042852 | 8.20E−03 | 0.058113 | 0.075248 | 113,531,045 | A | G | 3289 |
| rs2042853 | 8.20E−03 | 0.058113 | 0.075249 | 113,530,989 | C | T | 3290 |
| rs2042854 | 8.20E−03 | −0.058115 | 0.924745 | 113,530,733 | A | T | 3291 |
| rs12308436 | 8.21E−03 | −0.05779 | 0.925744 | 113,535,701 | C | G | 3292 |
| rs2555015 | 8.22E−03 | 0.029787 | 0.512111 | 113,158,157 | C | T | 3293 |
| rs11067417 | 8.28E−03 | −0.051067 | 0.096728 | 114,036,865 | G | T | 3294 |
| chr12: 112440357 | 8.32E−03 | −0.448687 | 0.004983 | 112,440,357 | C | T | 3295 |
| rs12308556 | 8.35E−03 | −0.057681 | 0.92604 | 113,535,930 | C | T | 3296 |
| rs12321753 | 8.39E−03 | 0.057646 | 0.073877 | 113,536,075 | C | G | 3297 |
| rs12321817 | 8.39E−03 | 0.057644 | 0.073873 | 113,536,180 | A | G | 3298 |
| rs7971904 | 8.39E−03 | 0.057643 | 0.073871 | 113,536,265 | A | G | 3299 |
| rs12317207 | 8.39E−03 | 0.057643 | 0.073871 | 113,536,277 | C | T | 3300 |
| rs12321869 | 8.39E−03 | 0.057642 | 0.073876 | 113,536,247 | C | G | 3301 |
| rs7972030 | 8.39E−03 | 0.057642 | 0.073869 | 113,536,403 | A | G | 3302 |
| rs7962277 | 8.39E−03 | 0.057642 | 0.073868 | 113,536,418 | A | T | 3303 |
| rs58705700 | 8.39E−03 | 0.036464 | 0.209816 | 114,177,031 | A | G | 3304 |
| rs12304158 | 8.39E−03 | 0.051252 | 0.903402 | 114,038,802 | A | G | 3305 |
| rs12310352 | 8.40E−03 | −0.057639 | 0.926138 | 113,536,717 | C | T | 3306 |
| rs73400631 | 8.40E−03 | −0.057639 | 0.926138 | 113,536,743 | A | G | 3307 |
| rs7975422 | 8.40E−03 | 0.057637 | 0.073863 | 113,536,858 | A | G | 3308 |
| rs16944528 | 8.40E−03 | −0.057637 | 0.926144 | 113,537,014 | G | T | 3309 |
| rs7965601 | 8.40E−03 | 0.057635 | 0.073866 | 113,536,894 | C | T | 3310 |
| rs12296971 | 8.40E−03 | 0.057633 | 0.073848 | 113,537,410 | A | G | 3311 |
| rs10850437 | 8.42E−03 | −0.031684 | 0.623524 | 114,021,234 | C | G | 3312 |
| rs61161138 | 8.44E−03 | −0.035519 | 0.774319 | 114,168,695 | A | C | 3313 |
| rs12298523 | 8.46E−03 | 0.057588 | 0.073772 | 113,537,749 | A | G | 3314 |
| rs12312330 | 8.47E−03 | −0.057577 | 0.926276 | 113,537,771 | C | T | 3315 |
| rs10774736 | 8.49E−03 | −0.033715 | 0.746485 | 113,112,523 | A | G | 3316 |
| rs3741698 | 8.50E−03 | 0.035207 | 0.733873 | 113,593,606 | C | G | 3317 |
| chr12: 113258682 | 8.52E−03 | −0.080182 | 0.036126 | 113,258,682 | A | G | 3318 |
| rs11067505 | 8.54E−03 | 0.037215 | 0.204254 | 114,189,009 | C | T | 3319 |
| rs7955248 | 8.54E−03 | −0.03242 | 0.295698 | 113,045,677 | A | G | 3320 |
| chr12: 112818361 | 8.54E−03 | −0.131106 | 0.014229 | 112,818,361 | A | G | 3321 |
| rs11067212 | 8.75E−03 | 0.057461 | 0.072253 | 113,545,050 | A | G | 3322 |
| rs10774762 | 8.80E−03 | 0.03511 | 0.319358 | 113,643,185 | A | G | 3323 |
| chr12: 113227545 | 8.85E−03 | −0.068039 | 0.919637 | 113,227,545 | C | T | 3324 |
| chr12: 112418264 | 8.86E−03 | −0.046352 | 0.217254 | 112,418,264 | A | T | 3325 |
| rs1025258 | 8.93E−03 | 0.033316 | 0.708119 | 113,090,264 | G | T | 3326 |
| rs1247936 | 9.05E−03 | 0.030061 | 0.551152 | 113,192,257 | C | T | 3327 |
| rs10774797 | 9.06E−03 | −0.03369 | 0.71439 | 114,154,969 | A | G | 3328 |
| chr12: 112568294 | 9.19E−03 | 0.161695 | 0.9881 | 112,568,294 | C | T | 3329 |
| rs1465550 | 9.21E−03 | −0.033505 | 0.747326 | 113,142,420 | C | T | 3330 |
| chr12: 114040639 | 9.22E−03 | −0.043277 | 0.672204 | 114,040,639 | A | T | 3331 |
| chr12: 113564871 | 9.25E−03 | −0.057932 | 0.082923 | 113,564,871 | A | G | 3332 |
| rs11066999 | 9.26E−03 | −0.033431 | 0.748 | 113,147,716 | G | T | 3333 |
| rs567223 | 9.27E−03 | −0.030864 | 0.459182 | 113,594,954 | G | T | 3334 |
| chr12: 114268624 | 9.31E−03 | 0.058195 | 0.093782 | 114,268,624 | A | G | 3335 |
| rs741636 | 9.32E−03 | −0.03192 | 0.297948 | 113,067,581 | A | G | 3336 |
| rs759922 | 9.32E−03 | 0.031919 | 0.702051 | 113,067,387 | C | T | 3337 |
| rs11066960 | 9.37E−03 | −0.031959 | 0.297768 | 113,068,849 | A | C | 3338 |
| chr12: 113292845 | 9.37E−03 | −0.161105 | 0.013438 | 113,292,845 | A | C | 3339 |
| rs11066997 | 9.48E−03 | −0.033301 | 0.748018 | 113,145,907 | C | T | 3340 |
| rs759926 | 9.52E−03 | 0.033732 | 0.690991 | 113,091,682 | A | C | 3341 |
| rs6489900 | 9.58E−03 | 0.031155 | 0.683037 | 112,439,970 | A | G | 3342 |
| rs12814627 | 9.60E−03 | −0.037011 | 0.254051 | 113,737,131 | G | T | 3343 |
| chr12: 113637997 | 9.62E−03 | 0.035857 | 0.362046 | 113,637,997 | A | G | 3344 |
| chr12: 112336025 | 9.64E−03 | 0.128967 | 0.978733 | 112,336,025 | C | T | 3345 |
| chr12: 112986437 | 9.65E−03 | −0.04027 | 0.714329 | 112,986,437 | A | G | 3346 |
| rs11066995 | 9.75E−03 | −0.033155 | 0.747967 | 113,144,364 | C | T | 3347 |
| chr12: 113235574 | 9.88E−03 | 0.049004 | 0.108484 | 113,235,574 | A | G | 3348 |
| chr12: 113348745 | 9.89E−03 | 0.166445 | 0.986234 | 113,348,745 | A | G | 3349 |
| chr12: 112601461 | 9.96E−03 | −0.086731 | 0.030454 | 112,601,461 | A | G | 3350 |
| chr12: 113180871 | 9.97E−03 | 0.046658 | 0.184086 | 113,180,871 | A | T | 3351 |
| rs11067299 | 9.98E−03 | −0.037622 | 0.186628 | 113,718,048 | T | C | 3352 |

TABLE 15
Association results for Atrial Fibrillation in a 2 Mb region flanking rs3825214 on
chromosome 12. Shown is marker identity, p-value of the association, odds ratio (OR),
frequency of effect allele in affecteds and controls, position in NCBI Build 36, identity of effect
allele, identity of other allele, and Seq ID for the marker. It should be noted that when reported
OR values are larger than unity, the effect allele is the at-risk allele, while, when reported OR
values are less than unity, the effect allele is the protective allele, and the other allele is the at-risk
allele. The OR value for the at-risk allele is in those cases equal to 1/OR for the protective (effect) allele.

| | | | | | | effect | other | SEQ ID |
|---|---|---|---|---|---|---|---|---|
| marker | p-value | OR | freq_aff | freq_ctl | position | allele | allele | NO: |
| rs1426434 | 2.65E−05 | 1.165855 | 0.261865 | 0.233036 | 114,150,745 | A | G | 2726 |
| rs7977083 | 1.29E−04 | 0.863749 | 0.232627 | 0.258198 | 113,274,883 | A | G | 273 |
| chr12: 113294500 | 2.58E−04 | 0.858966 | 0.662152 | 0.684227 | 113,294,500 | C | T | 2727 |
| rs1895597 | 2.81E−04 | 1.152996 | 0.791465 | 0.767752 | 113,275,267 | A | T | 274 |
| rs10744823 | 3.73E−04 | 0.866607 | 0.195153 | 0.217793 | 113,282,465 | C | T | 283 |
| rs12367410 | 3.95E−04 | 1.151327 | 0.805158 | 0.782355 | 113,281,071 | C | T | 280 |
| rs3825214 | 4.04E−04 | 1.14937 | 0.802918 | 0.779916 | 113,279,826 | A | G | 279 |
| rs73197386 | 4.26E−04 | 1.16576 | 0.17378 | 0.153608 | 113,237,330 | A | G | 2728 |
| rs2113433 | 4.39E−04 | 1.147987 | 0.79927 | 0.776361 | 113,278,440 | G | T | 278 |
| rs6489956 | 4.49E−04 | 1.148198 | 0.799879 | 0.777088 | 113,276,619 | C | T | 276 |
| rs7316919 | 4.58E−04 | 0.870884 | 0.199802 | 0.222528 | 113,275,838 | A | C | 275 |
| rs2384409 | 4.91E−04 | 0.87077 | 0.198486 | 0.220953 | 113,273,861 | A | G | 271 |
| chr12: 113225621 | 5.78E−04 | 0.817561 | 0.224107 | 0.239154 | 113,225,621 | A | G | 2729 |
| rs7964303 | 6.50E−04 | 1.135015 | 0.730224 | 0.706847 | 113,298,669 | G | T | 292 |
| rs10744824 | 7.59E−04 | 1.147924 | 0.819702 | 0.798632 | 113,293,021 | A | G | 2730 |
| rs2891503 | 8.51E−04 | 0.876751 | 0.218473 | 0.240113 | 113,274,193 | A | G | 272 |
| rs2384408 | 9.30E−04 | 0.876229 | 0.195917 | 0.217123 | 113,273,733 | A | G | 2731 |
| rs7308120 | 9.36E−04 | 1.141302 | 0.804266 | 0.783091 | 113,273,429 | C | T | 270 |
| rs35345 | 1.09E−03 | 0.890762 | 0.661001 | 0.684258 | 114,096,341 | A | G | 2732 |
| rs883079 | 1.10E−03 | 0.891688 | 0.282301 | 0.305965 | 113,277,623 | C | T | 277 |
| rs2384407 | 1.12E−03 | 1.122005 | 0.719434 | 0.695949 | 113,273,609 | A | G | 2733 |
| chr12: 112769351 | 1.32E−03 | 6.782825 | 0.003493 | 0.002281 | 112,769,351 | A | G | 2734 |
| rs9634170 | 1.40E−03 | 1.112225 | 0.387022 | 0.362823 | 114,116,167 | C | T | 2735 |
| rs1946295 | 1.43E−03 | 0.892221 | 0.268597 | 0.291322 | 113,286,744 | T | C | 288 |
| rs10507248 | 1.46E−03 | 0.892684 | 0.271268 | 0.293989 | 113,281,476 | G | T | 281 |
| rs7955405 | 1.47E−03 | 0.892653 | 0.270881 | 0.293565 | 113,281,689 | A | G | 282 |
| rs1895582 | 1.74E−03 | 1.120417 | 0.74445 | 0.722488 | 113,291,418 | A | G | 291 |
| rs12828095 | 1.75E−03 | 1.109689 | 0.368846 | 0.345107 | 114,128,897 | A | G | 2736 |
| rs5015007 | 1.82E−03 | 1.137928 | 0.822068 | 0.802817 | 113,289,466 | A | T | 2737 |
| rs9669457 | 1.86E−03 | 0.88762 | 0.233433 | 0.25412 | 113,260,665 | A | G | 267 |
| rs35335 | 1.88E−03 | 1.116341 | 0.307311 | 0.285163 | 114,101,059 | A | G | 2738 |
| rs35337 | 1.91E−03 | 0.895773 | 0.691688 | 0.713771 | 114,099,853 | A | G | 2739 |
| rs35343 | 1.92E−03 | 0.895888 | 0.692564 | 0.714642 | 114,097,827 | C | T | 2740 |
| rs35340 | 1.92E−03 | 0.895962 | 0.692654 | 0.714749 | 114,098,473 | A | G | 2741 |
| rs7135659 | 1.93E−03 | 1.11786 | 0.737119 | 0.715137 | 113,286,155 | A | G | 286 |
| rs1946293 | 1.94E−03 | 1.117715 | 0.738344 | 0.716389 | 113,287,143 | A | G | 289 |
| rs35342 | 1.94E−03 | 0.895972 | 0.692231 | 0.714295 | 114,098,017 | C | T | 2742 |
| rs35336 | 1.95E−03 | 1.115896 | 0.3073 | 0.285192 | 114,100,047 | A | C | 2743 |
| rs10774793 | 1.96E−03 | 1.116102 | 0.307166 | 0.285147 | 114,095,918 | C | T | 2744 |
| chr12: 112666241 | 2.02E−03 | 0.26925 | 0.002366 | 0.004555 | 112,666,241 | C | T | 2745 |
| rs1895583 | 2.03E−03 | 0.893819 | 0.254983 | 0.276562 | 113,291,268 | A | G | 2746 |
| rs3825215 | 2.04E−03 | 1.118504 | 0.740766 | 0.719121 | 113,289,281 | C | G | 290 |
| chr12: 113141748 | 2.16E−03 | 0.318177 | 0.004575 | 0.006972 | 113,141,748 | C | G | 2747 |
| chr12: 113083912 | 2.17E−03 | 3.020985 | 0.996946 | 0.994407 | 113,083,912 | C | T | 2748 |
| chr12: 113134372 | 2.20E−03 | 3.25286 | 0.996073 | 0.993725 | 113,134,372 | C | T | 2749 |
| chr12: 113125244 | 2.22E−03 | 0.316487 | 0.003699 | 0.006107 | 113,125,244 | C | T | 2750 |
| chr12: 112993658 | 2.23E−03 | 2.814843 | 0.996198 | 0.993532 | 112,993,658 | C | T | 2751 |
| chr12: 113477891 | 2.24E−03 | 1.470474 | 0.030776 | 0.024889 | 113,477,891 | A | G | 2752 |
| rs7312625 | 2.26E−03 | 1.116665 | 0.738341 | 0.716805 | 113,284,357 | A | G | 284 |
| rs12320320 | 2.26E−03 | 1.116802 | 0.30269 | 0.281482 | 113,294,066 | A | G | 2753 |
| chr12: 112932250 | 2.29E−03 | 8.706411 | 0.998712 | 0.997449 | 112,932,250 | C | T | 2754 |
| chr12: 113491653 | 2.31E−03 | 0.68392 | 0.968727 | 0.974693 | 113,491,653 | C | T | 2755 |
| rs4767237 | 2.40E−03 | 0.896097 | 0.260178 | 0.281583 | 113,285,196 | A | G | 285 |
| rs7959293 | 2.46E−03 | 0.897838 | 0.712871 | 0.7343 | 114,127,976 | A | G | 2756 |
| chr12: 113005908 | 2.66E−03 | 0.344874 | 0.003205 | 0.005724 | 113,005,908 | A | G | 2757 |
| rs1895585 | 2.69E−03 | 0.897424 | 0.25784 | 0.279041 | 113,286,521 | A | G | 287 |
| chr12: 113394183 | 2.75E−03 | 1.227535 | 0.065477 | 0.054705 | 113,394,183 | C | T | 2758 |
| rs58905048 | 2.80E−03 | 1.181896 | 0.90144 | 0.887654 | 114,268,601 | A | G | 2759 |
| chr12: 112866561 | 3.06E−03 | 7.360565 | 0.00305 | 0.002043 | 112,866,561 | C | T | 2760 |
| rs1862909 | 3.09E−03 | 0.885315 | 0.183715 | 0.20209 | 113,271,488 | A | G | 2761 |
| chr12: 112831844 | 3.19E−03 | 9.383192 | 0.002835 | 0.001934 | 112,831,844 | A | G | 2762 |
| rs61933020 | 3.24E−03 | 2.679617 | 0.996411 | 0.993828 | 112,971,280 | A | G | 2763 |
| rs16944123 | 3.25E−03 | 0.307865 | 0.002618 | 0.004759 | 113,290,599 | A | G | 2764 |
| rs7309910 | 3.27E−03 | 0.885733 | 0.183034 | 0.20126 | 113,270,637 | C | G | 269 |
| rs10744822 | 3.30E−03 | 0.885295 | 0.18162 | 0.199725 | 113,268,423 | C | T | 2765 |
| chr12: 112733905 | 3.48E−03 | 0.401928 | 0.003418 | 0.006121 | 112,733,905 | A | G | 2766 |
| rs11067138 | 3.48E−03 | 0.869066 | 0.867706 | 0.882858 | 113,404,753 | C | T | 2767 |
| chr12: 114104206 | 3.84E−03 | 0.819712 | 0.934105 | 0.944494 | 114,104,206 | C | T | 2768 |
| rs6489955 | 3.90E−03 | 1.126761 | 0.817956 | 0.800116 | 113,269,662 | A | G | 268 |
| chr12: 113809071 | 4.05E−03 | 0.748406 | 0.030972 | 0.038438 | 113,809,071 | C | T | 2769 |
| chr12: 113274191 | 4.31E−03 | 2.08051 | 0.990062 | 0.987043 | 113,274,191 | G | T | 2770 |
| rs7965033 | 4.40E−03 | 1.126544 | 0.824799 | 0.807401 | 113,295,738 | C | T | 2771 |
| rs6489959 | 4.48E−03 | 1.149067 | 0.135291 | 0.120785 | 113,376,841 | G | T | 2772 |
| chr12: 113462864 | 4.49E−03 | 1.782382 | 0.016547 | 0.013159 | 113,462,864 | A | G | 2773 |
| rs1426435 | 4.51E−03 | 0.899508 | 0.748918 | 0.768078 | 114,145,881 | C | T | 2774 |
| chr12: 112311600 | 4.89E−03 | 0.476216 | 0.018985 | 0.021888 | 112,311,600 | G | T | 2775 |
| rs6489953 | 4.95E−03 | 0.8898 | 0.17255 | 0.189848 | 113,249,145 | C | T | 264 |
| chr12: 112371400 | 5.03E−03 | 2.206676 | 0.982518 | 0.979799 | 112,371,400 | A | G | 2776 |
| chr12: 113254039 | 5.06E−03 | 0.83844 | 0.91383 | 0.92492 | 113,254,039 | G | T | 2777 |
| rs73201491 | 5.09E−03 | 1.104512 | 0.323052 | 0.30322 | 113,278,586 | C | T | 2778 |
| rs7307520 | 5.11E−03 | 0.890202 | 0.172343 | 0.189578 | 113,249,082 | A | G | 2779 |
| rs7964836 | 5.13E−03 | 1.123283 | 0.827657 | 0.810429 | 113,251,103 | C | G | 2780 |
| rs10774752 | 5.15E−03 | 0.890287 | 0.17235 | 0.189571 | 113,252,695 | A | G | 2781 |
| rs7296611 | 5.64E−03 | 1.100744 | 0.315313 | 0.295218 | 114,131,894 | A | G | 2782 |
| chr12: 113832847 | 5.79E−03 | 0.738365 | 0.029397 | 0.035978 | 113,832,847 | A | G | 2783 |
| chr12: 114118383 | 5.88E−03 | 1.130465 | 0.670569 | 0.654805 | 114,118,383 | C | T | 2784 |
| chr12: 113700621 | 5.94E−03 | 0.770496 | 0.934354 | 0.94152 | 113,700,621 | A | T | 2785 |
| chr12: 112339167 | 6.03E−03 | 0.472898 | 0.01782 | 0.020568 | 112,339,167 | G | T | 2786 |
| chr12: 114268788 | 6.09E−03 | 0.632556 | 0.98203 | 0.98596 | 114,268,788 | A | G | 2787 |
| rs61929720 | 6.16E−03 | 1.104605 | 0.266466 | 0.247506 | 114,125,242 | A | G | 2788 |
| rs7961277 | 6.20E−03 | 1.096646 | 0.563462 | 0.54288 | 113,298,462 | C | T | 2789 |
| rs7973825 | 6.36E−03 | 1.122321 | 0.175783 | 0.159615 | 114,134,543 | A | C | 2790 |
| rs1018243 | 6.36E−03 | 1.12234 | 0.175762 | 0.159604 | 114,134,749 | C | T | 2791 |
| rs1018244 | 6.41E−03 | 0.891039 | 0.824287 | 0.840419 | 114,134,875 | G | T | 2792 |
| chr12: 113206274 | 6.51E−03 | 0.458888 | 0.987356 | 0.989643 | 113,206,274 | C | T | 2793 |
| rs8181608 | 6.55E−03 | 0.892417 | 0.168585 | 0.185187 | 113,245,966 | A | G | 259 |
| rs7966567 | 6.55E−03 | 0.892418 | 0.168608 | 0.185207 | 113,245,863 | C | T | 258 |
| rs10744818 | 6.56E−03 | 1.120546 | 0.831415 | 0.814814 | 113,246,068 | C | T | 260 |
| rs8181683 | 6.56E−03 | 0.892423 | 0.168585 | 0.185186 | 113,246,101 | C | T | 261 |
| rs8181627 | 6.56E−03 | 1.120545 | 0.831415 | 0.814814 | 113,246,147 | C | T | 262 |
| rs10744819 | 6.56E−03 | 0.892425 | 0.168585 | 0.185186 | 113,246,213 | A | G | 263 |
| rs10744820 | 6.63E−03 | 0.892561 | 0.168585 | 0.185164 | 113,252,510 | A | G | 265 |
| rs1895593 | 6.65E−03 | 1.120509 | 0.831125 | 0.81459 | 113,245,198 | A | G | 257 |
| rs1895587 | 6.68E−03 | 1.120281 | 0.831391 | 0.814833 | 113,253,912 | C | T | 266 |
| chr12: 113703732 | 6.70E−03 | 0.354315 | 0.996078 | 0.997657 | 113,703,732 | C | T | 2794 |
| chr12: 114069962 | 6.86E−03 | 0.790866 | 0.061141 | 0.069218 | 114,069,962 | A | C | 2795 |
| rs6489952 | 6.98E−03 | 1.120898 | 0.830993 | 0.814716 | 113,243,156 | A | G | 256 |
| rs4766757 | 7.10E−03 | 0.891917 | 0.824826 | 0.840705 | 114,138,010 | C | T | 2796 |
| rs7968451 | 7.12E−03 | 0.891951 | 0.82484 | 0.840713 | 114,138,256 | C | T | 2797 |
| rs11610761 | 7.51E−03 | 1.180075 | 0.933105 | 0.921917 | 114,048,070 | C | T | 2798 |
| rs11067089 | 8.01E−03 | 1.095296 | 0.374055 | 0.354598 | 113,297,009 | C | T | 2799 |
| rs4767303 | 8.25E−03 | 0.908821 | 0.731486 | 0.749861 | 114,123,986 | C | T | 2800 |
| rs10850456 | 8.29E−03 | 0.916065 | 0.621727 | 0.641789 | 114,146,153 | A | T | 2801 |
| rs11612294 | 8.35E−03 | 0.864146 | 0.172083 | 0.184306 | 113,567,048 | A | T | 2802 |
| chr12: 113403495 | 8.42E−03 | 0.653525 | 0.969878 | 0.973862 | 113,403,495 | G | T | 2803 |
| chr12: 112404356 | 8.51E−03 | 2.094628 | 0.982872 | 0.980323 | 112,404,356 | C | T | 2804 |
| rs11067054 | 8.52E−03 | 0.887388 | 0.154649 | 0.169464 | 113,256,940 | A | G | 2805 |
| rs933748 | 8.63E−03 | 0.897778 | 0.190116 | 0.206411 | 113,245,039 | C | T | 2806 |
| rs56268591 | 9.02E−03 | 1.118593 | 0.184335 | 0.16909 | 114,152,846 | A | G | 2807 |
| chr12: 114020816 | 9.07E−03 | 0.674882 | 0.019125 | 0.023769 | 114,020,816 | C | T | 2808 |
| rs11615114 | 9.15E−03 | 0.620512 | 0.014453 | 0.018256 | 113,825,200 | A | G | 2809 |
| chr12: 113762881 | 9.31E−03 | 2.835002 | 0.003721 | 0.002263 | 113,762,881 | C | T | 2810 |
| rs3782464 | 9.43E−03 | 0.917343 | 0.563025 | 0.582748 | 113,288,963 | A | C | 2811 |
| rs4767305 | 9.45E−03 | 0.913795 | 0.684973 | 0.7038 | 114,133,134 | A | T | 2812 |
| rs4767306 | 9.46E−03 | 1.094329 | 0.315013 | 0.296188 | 114,133,139 | A | G | 2813 |
| rs10774795 | 9.50E−03 | 0.917108 | 0.632862 | 0.652506 | 114,137,570 | C | T | 2814 |
| chr12: 113808331 | 9.53E−03 | 2.792127 | 0.003641 | 0.002181 | 113,808,331 | A | G | 2815 |
| chr12: 113931316 | 9.74E−03 | 0.541059 | 0.011467 | 0.014391 | 113,931,316 | C | T | 2816 |
| rs4767239 | 9.78E−03 | 1.114927 | 0.813618 | 0.797927 | 113,300,931 | C | G | 2817 |
| rs10744846 | 9.80E−03 | 0.917515 | 0.632588 | 0.65217 | 114,138,628 | A | G | 2818 |

TABLE 16
Association results for PR interval in a 2 Mb region flanking rs3807989 on
chromosome 7. Shown is marker identity, p-value of the association, magnitude of effect (in
units of fractions of standard deviations), frequency of effect allele, position in NCBI Build
36, identity of effect allele, identity of other allele, SEQ ID for the marker. It should be noted
that a positive value for an effect represents an increase in the interval conferred by the
effect allele, while a negative value for the effect represents a decrease (i.e. the allele
correlated with the negative effect is predictive of a decreased value of the measure).

| | | | | | effect | other | SEQ ID |
|---|---|---|---|---|---|---|---|
| marker | p-value | effect | freq | position | allele | allele | NO: |
| rs3807989 | 3.09E−08 | 0.062818 | 0.404775 | 115,973,477 | A | G | 197 |
| rs11773845 | 3.11E−08 | −0.062813 | 0.595254 | 115,978,537 | A | C | 200 |
| rs1997572 | 3.12E−08 | 0.062835 | 0.40479 | 115,986,064 | A | G | 570 |
| rs1997571 | 3.13E−08 | −0.062831 | 0.595195 | 115,985,857 | A | G | 571 |
| rs10953822 | 4.94E−06 | 0.059099 | 0.249799 | 115,985,702 | C | G | 572 |
| rs3815412 | 4.95E−06 | 0.059043 | 0.249855 | 115,977,929 | C | T | 199 |
| rs9886216 | 4.95E−06 | −0.059043 | 0.750145 | 115,978,933 | A | G | 573 |
| rs9885998 | 4.95E−06 | 0.059043 | 0.249855 | 115,979,048 | A | G | 574 |
| rs3757732 | 4.95E−06 | 0.059043 | 0.249851 | 115,980,941 | A | C | 204 |
| rs3757733 | 4.95E−06 | 0.059043 | 0.24985 | 115,980,965 | A | T | 205 |
| rs7804372 | 4.95E−06 | 0.059043 | 0.249845 | 115,981,464 | A | T | 206 |
| rs7789117 | 4.95E−06 | −0.059043 | 0.750155 | 115,981,620 | C | T | 575 |
| rs729949 | 4.95E−06 | 0.059043 | 0.249844 | 115,982,141 | A | G | 207 |
| rs3807990 | 4.96E−06 | −0.059054 | 0.750109 | 115,983,999 | C | T | 208 |
| rs3807992 | 4.97E−06 | 0.059056 | 0.249904 | 115,984,481 | A | G | 209 |
| rs3807994 | 4.97E−06 | 0.059057 | 0.249905 | 115,984,815 | A | G | 210 |
| rs6466588 | 4.97E−06 | −0.059057 | 0.750094 | 115,985,326 | A | T | 212 |
| rs3801995 | 4.98E−06 | −0.059037 | 0.750178 | 115,977,833 | C | T | 198 |
| rs58718486 | 1.94E−05 | 0.052305 | 0.54813 | 115,916,238 | A | T | 576 |
| rs1476451 | 2.13E−05 | 0.049701 | 0.427803 | 115,856,547 | C | G | 577 |
| rs7810505 | 2.68E−05 | 0.047107 | 0.482705 | 115,898,314 | G | T | 578 |
| rs717957 | 2.68E−05 | −0.047101 | 0.517307 | 115,900,343 | C | G | 170 |
| rs28495552 | 2.68E−05 | 0.0471 | 0.482689 | 115,900,980 | C | G | 579 |
| rs926197 | 2.68E−05 | −0.047085 | 0.51734 | 115,905,566 | A | C | 580 |
| rs6976316 | 2.69E−05 | −0.047064 | 0.517371 | 115,910,179 | A | G | 174 |
| rs6953982 | 2.77E−05 | 0.047037 | 0.482172 | 115,916,526 | C | T | 581 |
| rs10228178 | 2.86E−05 | −0.046981 | 0.518163 | 115,919,447 | A | G | 177 |
| rs6975548 | 2.87E−05 | 0.046959 | 0.483103 | 115,913,401 | C | T | 582 |
| rs55883210 | 3.12E−05 | −0.046765 | 0.520851 | 115,947,760 | A | G | 583 |
| rs6954077 | 3.14E−05 | −0.047285 | 0.512207 | 115,916,389 | A | G | 175 |
| rs28557111 | 3.15E−05 | −0.046773 | 0.515849 | 115,903,500 | A | G | 584 |
| rs7795510 | 3.16E−05 | −0.046725 | 0.520871 | 115,944,197 | C | T | 585 |
| rs2109514 | 3.21E−05 | −0.046706 | 0.520633 | 115,947,197 | A | G | 586 |
| rs12531767 | 3.23E−05 | −0.047188 | 0.508548 | 115,916,241 | A | T | 587 |
| rs3919515 | 3.36E−05 | −0.046552 | 0.52099 | 115,939,020 | C | G | 185 |
| rs2270188 | 3.37E−05 | 0.046559 | 0.478718 | 115,927,760 | G | T | 179 |
| rs2402080 | 3.39E−05 | −0.046571 | 0.519518 | 115,922,252 | C | G | 588 |
| rs2270189 | 3.50E−05 | 0.046445 | 0.478871 | 115,927,852 | A | G | 589 |
| rs10271007 | 3.75E−05 | 0.046233 | 0.478751 | 115,933,085 | A | G | 180 |
| rs4730743 | 3.75E−05 | 0.046228 | 0.478748 | 115,933,193 | A | T | 181 |
| rs4727833 | 3.85E−05 | 0.046142 | 0.478703 | 115,935,144 | C | G | 182 |
| rs6980387 | 3.90E−05 | 0.046177 | 0.496888 | 115,914,118 | A | G | 590 |
| rs6466579 | 4.94E−05 | −0.046124 | 0.519502 | 115,938,391 | C | T | 184 |
| rs13223362 | 5.77E−05 | −0.045611 | 0.527322 | 115,924,242 | A | G | 591 |
| rs3807986 | 6.57E−05 | −0.051143 | 0.742199 | 115,965,061 | A | G | 192 |
| rs768108 | 7.86E−05 | 0.044788 | 0.427769 | 115,895,894 | A | G | 169 |
| rs9649392 | 7.91E−05 | −0.04477 | 0.572245 | 115,894,622 | A | G | 592 |
| rs11769417 | 8.04E−05 | 0.044719 | 0.427687 | 115,891,014 | A | G | 593 |
| rs1007751 | 8.13E−05 | 0.044347 | 0.474752 | 115,897,291 | A | T | 594 |
| rs28494601 | 8.14E−05 | 0.04468 | 0.427654 | 115,888,497 | A | C | 595 |
| rs35421698 | 8.21E−05 | −0.044653 | 0.572386 | 115,886,677 | C | T | 596 |
| rs10235658 | 8.23E−05 | 0.044644 | 0.427605 | 115,886,143 | C | T | 597 |
| rs10464649 | 8.85E−05 | 0.044377 | 0.430074 | 115,860,803 | C | T | 165 |
| rs13225166 | 8.87E−05 | −0.044373 | 0.569915 | 115,862,687 | C | T | 598 |
| rs7781492 | 8.96E−05 | −0.044346 | 0.569811 | 115,857,211 | C | G | 164 |
| rs12706089 | 9.15E−05 | −0.044286 | 0.569784 | 115,871,603 | C | T | 166 |
| rs4727831 | 9.41E−05 | 0.044532 | 0.423964 | 115,881,219 | A | G | 168 |
| rs987791 | 1.05E−04 | −0.076116 | 0.906193 | 115,921,937 | A | G | 599 |
| rs34123906 | 1.41E−04 | −0.080728 | 0.908622 | 115,986,905 | A | G | 600 |
| chr7: 115807875 | 2.03E−04 | 0.074809 | 0.85067 | 115,807,875 | A | T | 601 |
| rs55994026 | 2.20E−04 | −0.061232 | 0.346153 | 115,931,201 | A | G | 602 |
| rs12540549 | 2.26E−04 | −0.049432 | 0.529532 | 115,982,768 | A | G | 603 |
| chr7: 115982911 | 2.69E−04 | 0.067158 | 0.104774 | 115,982,911 | A | G | 604 |
| rs10261304 | 2.81E−04 | −0.04743 | 0.391013 | 115,943,213 | A | C | 605 |
| rs2056865 | 3.26E−04 | −0.043456 | 0.688606 | 116,007,768 | A | G | 231 |
| rs6978354 | 3.30E−04 | −0.045711 | 0.682245 | 116,013,658 | A | G | 236 |
| rs6955302 | 3.35E−04 | −0.044553 | 0.698159 | 116,012,940 | C | T | 235 |
| rs3807993 | 3.63E−04 | 0.062551 | 0.114223 | 115,984,808 | A | T | 606 |
| rs1049334 | 3.63E−04 | 0.062551 | 0.114226 | 115,987,616 | A | G | 607 |
| rs62469031 | 3.64E−04 | −0.062526 | 0.885797 | 115,983,077 | A | G | 608 |
| rs3807995 | 3.64E−04 | −0.062546 | 0.885775 | 115,985,212 | C | T | 609 |
| rs73206045 | 3.75E−04 | 0.066159 | 0.102339 | 115,890,043 | A | C | 610 |
| rs13246051 | 3.76E−04 | 0.043397 | 0.31462 | 116,010,773 | A | T | 611 |
| rs3801994 | 3.92E−04 | 0.062198 | 0.114253 | 115,977,705 | A | G | 612 |
| rs3801993 | 3.95E−04 | −0.06217 | 0.885746 | 115,977,618 | C | G | 613 |
| rs34678019 | 3.95E−04 | −0.062165 | 0.885746 | 115,976,726 | A | G | 614 |
| rs13242816 | 3.95E−04 | −0.062164 | 0.885746 | 115,976,612 | C | T | 615 |
| rs13243017 | 3.95E−04 | 0.062164 | 0.114254 | 115,976,607 | A | G | 616 |
| rs2052105 | 3.96E−04 | 0.062156 | 0.114254 | 115,975,215 | C | T | 617 |
| rs12668226 | 3.96E−04 | −0.062155 | 0.885746 | 115,974,926 | A | C | 618 |
| rs12672038 | 3.97E−04 | 0.062151 | 0.114254 | 115,974,342 | A | G | 619 |
| rs34979439 | 3.99E−04 | 0.069086 | 0.098271 | 115,833,967 | A | G | 620 |
| rs1858810 | 4.07E−04 | −0.040458 | 0.576707 | 115,846,095 | A | G | 163 |
| rs62471192 | 4.66E−04 | 0.06472 | 0.105528 | 115,891,690 | A | G | 621 |
| rs35866921 | 4.76E−04 | 0.065489 | 0.102714 | 115,891,694 | A | G | 622 |
| chr7: 115931213 | 4.83E−04 | 0.047327 | 0.48455 | 115,931,213 | A | G | 623 |
| rs34916272 | 4.84E−04 | 0.065591 | 0.102369 | 115,913,521 | C | T | 624 |
| rs73208106 | 4.90E−04 | 0.061876 | 0.112718 | 115,960,499 | A | G | 625 |
| rs13233553 | 4.91E−04 | −0.061842 | 0.887548 | 115,969,468 | C | G | 626 |
| rs12669209 | 4.95E−04 | 0.061872 | 0.112402 | 115,964,210 | A | G | 627 |
| rs3807988 | 4.97E−04 | −0.061833 | 0.887631 | 115,967,971 | A | C | 628 |
| rs55701446 | 5.13E−04 | −0.04934 | 0.81048 | 115,937,313 | G | T | 629 |
| rs56063232 | 5.15E−04 | −0.061883 | 0.888086 | 115,960,044 | G | T | 630 |
| rs55930206 | 5.21E−04 | −0.061927 | 0.888286 | 115,960,086 | C | T | 631 |
| rs3779513 | 5.22E−04 | 0.062018 | 0.111488 | 115,966,228 | C | T | 632 |
| rs36200236 | 5.35E−04 | 0.061735 | 0.110666 | 115,907,135 | C | T | 633 |
| rs34325296 | 5.41E−04 | −0.061425 | 0.888893 | 115,909,645 | C | T | 634 |
| rs35595472 | 5.41E−04 | 0.061425 | 0.111107 | 115,909,542 | A | G | 635 |
| rs35800921 | 5.41E−04 | 0.061424 | 0.111105 | 115,911,277 | A | G | 636 |
| rs6979182 | 5.41E−04 | 0.061424 | 0.111113 | 115,906,581 | G | T | 637 |
| rs34424131 | 5.41E−04 | 0.061424 | 0.111113 | 115,906,238 | A | G | 638 |
| rs36011826 | 5.41E−04 | 0.061424 | 0.111115 | 115,905,572 | A | G | 639 |
| rs35538349 | 5.42E−04 | −0.061423 | 0.888885 | 115,905,132 | C | T | 640 |
| rs35037267 | 5.42E−04 | −0.061423 | 0.888884 | 115,904,823 | A | T | 641 |
| rs56298491 | 5.42E−04 | −0.061423 | 0.888883 | 115,903,923 | C | T | 642 |
| rs34870046 | 5.42E−04 | 0.061422 | 0.111119 | 115,903,190 | A | G | 643 |
| rs34752288 | 5.42E−04 | 0.061422 | 0.11112 | 115,902,178 | G | T | 644 |
| rs62468973 | 5.42E−04 | −0.061423 | 0.888898 | 115,913,070 | G | T | 645 |
| rs17138714 | 5.42E−04 | −0.061421 | 0.888879 | 115,901,510 | C | T | 646 |
| rs34234085 | 5.42E−04 | 0.061421 | 0.111122 | 115,901,302 | A | G | 647 |
| rs13235720 | 5.42E−04 | 0.061421 | 0.111122 | 115,900,899 | C | T | 648 |
| rs13247987 | 5.42E−04 | −0.061421 | 0.888877 | 115,900,580 | A | C | 649 |
| rs62468976 | 5.42E−04 | −0.061422 | 0.8889 | 115,914,127 | C | G | 650 |
| rs62471202 | 5.42E−04 | 0.06142 | 0.111124 | 115,899,798 | A | G | 651 |
| rs62468978 | 5.42E−04 | −0.061422 | 0.8889 | 115,914,335 | A | G | 652 |
| rs55977427 | 5.42E−04 | −0.061419 | 0.888873 | 115,898,004 | C | T | 653 |
| rs7809755 | 5.42E−04 | −0.061419 | 0.888873 | 115,897,968 | C | T | 654 |
| rs55833477 | 5.42E−04 | −0.061418 | 0.888873 | 115,897,611 | C | G | 655 |
| rs35800776 | 5.42E−04 | 0.061418 | 0.111128 | 115,897,305 | A | C | 656 |
| rs67652573 | 5.42E−04 | 0.061418 | 0.111128 | 115,897,194 | C | T | 657 |
| rs35364754 | 5.42E−04 | 0.061418 | 0.111128 | 115,896,952 | G | T | 658 |
| rs2188243 | 5.42E−04 | 0.061418 | 0.111129 | 115,896,529 | A | G | 659 |
| rs17138708 | 5.42E−04 | 0.061417 | 0.111129 | 115,896,298 | G | T | 660 |
| rs17138706 | 5.42E−04 | −0.061417 | 0.888871 | 115,896,255 | A | G | 661 |
| rs56275709 | 5.42E−04 | −0.061417 | 0.88887 | 115,895,725 | A | G | 662 |
| rs62471198 | 5.42E−04 | 0.061416 | 0.111131 | 115,895,199 | C | T | 663 |
| rs34228114 | 5.42E−04 | −0.061415 | 0.888867 | 115,894,222 | C | T | 664 |
| rs35210394 | 5.42E−04 | −0.061413 | 0.888864 | 115,892,147 | C | G | 665 |
| rs35505552 | 5.42E−04 | 0.061413 | 0.111136 | 115,892,103 | A | T | 666 |
| rs12706090 | 5.42E−04 | −0.061412 | 0.888863 | 115,891,281 | C | T | 667 |
| rs56250718 | 5.42E−04 | −0.061412 | 0.888862 | 115,890,539 | A | G | 668 |
| rs55803834 | 5.42E−04 | −0.061411 | 0.888862 | 115,890,377 | C | T | 669 |
| rs4292624 | 5.42E−04 | −0.061411 | 0.888861 | 115,889,960 | A | C | 670 |
| rs62471189 | 5.43E−04 | 0.06141 | 0.111141 | 115,888,824 | A | G | 671 |
| rs56161415 | 5.43E−04 | −0.061409 | 0.888858 | 115,888,080 | G | T | 672 |
| rs55726675 | 5.43E−04 | 0.061408 | 0.111142 | 115,887,934 | A | G | 673 |
| rs62471187 | 5.43E−04 | 0.061408 | 0.111142 | 115,887,620 | A | G | 674 |
| rs13247015 | 5.43E−04 | −0.061401 | 0.888851 | 115,882,859 | A | C | 675 |
| rs62471184 | 5.44E−04 | 0.061394 | 0.111155 | 115,877,536 | A | G | 676 |
| rs67982517 | 5.44E−04 | −0.061388 | 0.888837 | 115,862,599 | A | G | 677 |
| rs34645128 | 5.44E−04 | 0.061388 | 0.111163 | 115,865,618 | A | T | 678 |
| rs34205980 | 5.44E−04 | 0.061388 | 0.111163 | 115,865,642 | A | T | 679 |
| rs56180538 | 5.44E−04 | −0.061388 | 0.888837 | 115,866,947 | C | T | 680 |
| rs12672717 | 5.49E−04 | 0.061408 | 0.110978 | 115,915,506 | A | G | 681 |
| rs2402078 | 5.53E−04 | −0.0614 | 0.889075 | 115,915,884 | A | C | 682 |
| rs2402079 | 5.53E−04 | 0.061399 | 0.110923 | 115,915,906 | A | T | 683 |
| rs66985071 | 5.63E−04 | −0.061368 | 0.889216 | 115,917,669 | C | T | 684 |
| rs12706091 | 5.65E−04 | 0.06136 | 0.110757 | 115,918,019 | C | G | 685 |
| rs3807987 | 5.75E−04 | 0.062025 | 0.110326 | 115,967,070 | A | G | 686 |
| rs34877271 | 5.78E−04 | 0.064553 | 0.10362 | 115,837,103 | A | G | 687 |
| rs2109517 | 5.81E−04 | −0.041996 | 0.69812 | 116,004,893 | A | G | 230 |
| rs34295495 | 5.86E−04 | 0.06102 | 0.111328 | 115,855,502 | A | C | 688 |
| rs1018859 | 6.12E−04 | −0.060787 | 0.888586 | 115,854,583 | C | T | 689 |
| rs2191498 | 6.31E−04 | 0.060975 | 0.110166 | 115,925,805 | T | C | 690 |
| rs10270072 | 6.32E−04 | −0.041866 | 0.698169 | 115,999,710 | A | C | 691 |
| rs36200748 | 6.46E−04 | −0.060604 | 0.888019 | 115,839,863 | C | T | 692 |
| rs17138747 | 6.49E−04 | 0.060866 | 0.109893 | 115,919,906 | A | G | 693 |
| rs36199027 | 6.54E−04 | 0.060552 | 0.112059 | 115,837,771 | C | T | 694 |
| rs56010123 | 6.54E−04 | −0.061707 | 0.890566 | 115,960,282 | C | T | 695 |
| rs35184471 | 6.55E−04 | 0.060827 | 0.109847 | 115,920,482 | A | G | 696 |
| rs9770220 | 6.62E−04 | 0.039194 | 0.41894 | 115,837,829 | A | G | 697 |
| rs17138750 | 6.63E−04 | −0.060765 | 0.890221 | 115,921,406 | A | G | 698 |
| rs987790 | 6.68E−04 | 0.060734 | 0.109745 | 115,921,869 | A | T | 699 |
| rs56382464 | 6.71E−04 | −0.060458 | 0.887669 | 115,828,064 | C | G | 700 |
| rs12706096 | 6.71E−04 | −0.041916 | 0.701462 | 116,001,878 | C | T | 701 |
| rs36125850 | 6.73E−04 | −0.060456 | 0.887609 | 115,827,154 | C | T | 702 |
| rs2024209 | 6.75E−04 | 0.060684 | 0.109693 | 115,922,572 | C | T | 703 |
| rs6968230 | 6.92E−04 | −0.060555 | 0.890433 | 115,924,285 | G | T | 704 |
| rs13226307 | 6.97E−04 | −0.06052 | 0.890465 | 115,924,721 | A | T | 705 |
| rs17138767 | 6.99E−04 | −0.060505 | 0.89048 | 115,924,913 | A | G | 706 |
| rs12669740 | 7.10E−04 | 0.060426 | 0.10945 | 115,925,812 | C | T | 707 |
| rs2191499 | 7.10E−04 | −0.060424 | 0.89055 | 115,925,835 | C | T | 708 |
| rs2191501 | 7.15E−04 | −0.060396 | 0.890561 | 115,926,067 | G | T | 709 |
| rs56001716 | 7.36E−04 | 0.0611 | 0.111903 | 115,887,896 | C | T | 710 |
| rs13235183 | 7.46E−04 | −0.060199 | 0.890629 | 115,927,385 | G | T | 711 |
| rs34936262 | 7.53E−04 | 0.060262 | 0.109657 | 115,947,258 | A | G | 712 |
| rs34652384 | 7.55E−04 | 0.060245 | 0.109635 | 115,944,247 | C | T | 713 |
| chr7: 115893706 | 7.55E−04 | 0.063481 | 0.113198 | 115,893,706 | A | T | 714 |
| rs35515812 | 7.56E−04 | −0.060232 | 0.890381 | 115,943,268 | C | G | 715 |
| rs7801950 | 7.58E−04 | −0.060214 | 0.890403 | 115,942,019 | C | T | 716 |
| rs34082946 | 7.59E−04 | 0.060206 | 0.109592 | 115,941,549 | A | G | 717 |
| rs35062002 | 7.65E−04 | 0.060083 | 0.109332 | 115,929,694 | A | G | 718 |
| rs7796429 | 7.74E−04 | 0.060024 | 0.109312 | 115,931,605 | C | T | 719 |
| chr7: 115982913 | 7.75E−04 | 0.061691 | 0.113359 | 115,982,913 | A | G | 720 |
| rs56309428 | 7.88E−04 | −0.059955 | 0.890675 | 115,937,373 | G | T | 721 |
| chr7: 116458967 | 7.92E−04 | −0.095774 | 0.05223 | 116,458,967 | C | T | 722 |
| rs2052106 | 8.00E−04 | 0.041662 | 0.284336 | 115,993,901 | A | G | 225 |
| rs55691296 | 8.38E−04 | −0.041453 | 0.716271 | 115,991,326 | A | G | 723 |
| rs13221364 | 8.74E−04 | −0.058173 | 0.88042 | 115,870,780 | C | T | 724 |
| rs12671606 | 1.01E−03 | 0.037543 | 0.44554 | 115,903,077 | G | T | 725 |
| rs7778733 | 1.18E−03 | 0.041339 | 0.724607 | 115,956,679 | A | C | 726 |
| rs10279056 | 1.19E−03 | 0.036248 | 0.457602 | 115,633,993 | A | G | 727 |
| chr7: 115941774 | 1.33E−03 | 0.074724 | 0.8607 | 115,941,774 | C | T | 728 |
| rs17587314 | 1.37E−03 | 0.046041 | 0.183577 | 115,919,879 | A | T | 729 |
| rs17138749 | 1.38E−03 | −0.046012 | 0.816486 | 115,920,334 | A | C | 730 |
| rs35774544 | 1.57E−03 | −0.122981 | 0.975299 | 115,906,674 | A | G | 731 |
| rs7811851 | 1.74E−03 | −0.036887 | 0.659672 | 115,943,967 | A | T | 732 |
| rs6466580 | 1.76E−03 | 0.036835 | 0.340258 | 115,941,962 | C | T | 733 |
| rs17516287 | 1.77E−03 | −0.036814 | 0.659726 | 115,941,422 | C | G | 734 |
| rs17588172 | 1.77E−03 | 0.036809 | 0.340226 | 115,941,251 | G | T | 735 |
| rs9640770 | 1.77E−03 | 0.039214 | 0.271981 | 115,897,149 | A | C | 736 |
| chr7: 115989137 | 1.81E−03 | 0.040261 | 0.417758 | 115,989,137 | G | T | 737 |
| rs28485381 | 1.82E−03 | −0.039127 | 0.727967 | 115,899,686 | C | T | 738 |
| rs12670840 | 1.89E−03 | −0.03893 | 0.727969 | 115,912,408 | C | T | 739 |
| rs1052990 | 1.92E−03 | −0.036714 | 0.660484 | 115,935,606 | T | G | 740 |
| rs12530912 | 2.02E−03 | −0.038735 | 0.728385 | 115,914,765 | T | G | 741 |
| rs73206052 | 2.06E−03 | −0.055838 | 0.893583 | 115,904,292 | G | T | 742 |
| rs28587043 | 2.08E−03 | 0.036249 | 0.339357 | 115,932,932 | A | G | 743 |
| rs12668473 | 2.08E−03 | −0.036247 | 0.660649 | 115,932,875 | C | T | 744 |
| chr7: 115588710 | 2.10E−03 | 0.067298 | 0.888747 | 115,588,710 | A | G | 745 |
| rs13229461 | 2.13E−03 | −0.036187 | 0.660839 | 115,931,038 | C | T | 746 |
| rs11980719 | 2.16E−03 | 0.036151 | 0.339058 | 115,930,044 | A | T | 747 |
| rs11983865 | 2.18E−03 | −0.036138 | 0.660973 | 115,929,698 | A | G | 748 |
| rs11983864 | 2.18E−03 | −0.036138 | 0.660973 | 115,929,696 | A | C | 749 |
| rs3779511 | 2.20E−03 | 0.036111 | 0.338952 | 115,929,014 | G | T | 750 |
| chr7: 115998079 | 2.23E−03 | −0.109345 | 0.039593 | 115,998,079 | C | T | 751 |
| chr7: 115950414 | 2.28E−03 | 0.075698 | 0.068932 | 115,950,414 | A | G | 752 |
| rs28613932 | 2.33E−03 | −0.034259 | 0.551984 | 115,633,516 | A | G | 753 |
| rs71564558 | 2.44E−03 | 0.125406 | 0.022055 | 115,895,488 | A | G | 754 |
| chr7: 115945331 | 2.48E−03 | 0.126766 | 0.021133 | 115,945,331 | A | G | 755 |
| rs13227232 | 2.49E−03 | −0.126581 | 0.978787 | 115,925,428 | C | G | 756 |
| rs7788491 | 2.53E−03 | 0.035248 | 0.395519 | 115,837,213 | C | T | 757 |
| rs35377909 | 2.64E−03 | −0.12459 | 0.978144 | 115,920,143 | A | G | 758 |
| rs13224179 | 2.67E−03 | 0.124482 | 0.021772 | 115,949,207 | A | C | 759 |
| rs13240764 | 2.74E−03 | 0.033696 | 0.440331 | 115,632,950 | C | T | 760 |
| rs62468956 | 2.74E−03 | 0.035483 | 0.386359 | 115,837,225 | A | G | 761 |
| rs71564555 | 3.00E−03 | 0.123686 | 0.022015 | 115,822,449 | C | T | 762 |
| chr7: 116043056 | 3.16E−03 | −0.198849 | 0.016856 | 116,043,056 | C | T | 763 |
| rs57669655 | 3.20E−03 | 0.035144 | 0.383399 | 115,837,228 | A | C | 764 |
| rs38860 | 3.23E−03 | 0.082706 | 0.046691 | 116,182,493 | C | T | 765 |
| rs193687 | 3.26E−03 | −0.082847 | 0.953927 | 116,219,242 | C | T | 766 |
| chr7: 116504377 | 3.37E−03 | −0.750072 | 0.997903 | 116,504,377 | A | G | 767 |
| chr7: 115950425 | 3.59E−03 | −0.039049 | 0.372423 | 115,950,425 | A | G | 768 |
| rs1049337 | 3.65E−03 | 0.037314 | 0.741937 | 115,987,823 | C | T | 216 |
| rs7788470 | 3.79E−03 | 0.036381 | 0.354316 | 115,837,158 | C | T | 769 |
| rs41788 | 3.81E−03 | −0.082849 | 0.961073 | 116,278,450 | A | C | 770 |
| rs13243307 | 3.81E−03 | 0.123656 | 0.021551 | 115,540,517 | A | C | 771 |
| rs71564553 | 3.91E−03 | 0.119675 | 0.02339 | 115,780,758 | A | G | 772 |
| chr7: 115786440 | 3.93E−03 | −0.119416 | 0.976671 | 115,786,440 | A | G | 773 |
| chr7: 115619988 | 3.98E−03 | 0.121874 | 0.022402 | 115,619,988 | A | G | 774 |
| chr7: 116633074 | 4.24E−03 | −0.124755 | 0.976069 | 116,633,074 | A | C | 775 |
| chr7: 115069465 | 4.49E−03 | −0.055797 | 0.111166 | 115,069,465 | A | G | 776 |
| rs41796 | 4.75E−03 | −0.081095 | 0.962321 | 116,297,475 | C | T | 777 |
| chr7: 115869733 | 4.81E−03 | 0.042863 | 0.678637 | 115,869,733 | C | T | 778 |
| rs437 | 4.94E−03 | 0.033163 | 0.343516 | 116,084,132 | C | T | 779 |
| chr7: 116078942 | 5.31E−03 | −0.528536 | 0.997313 | 116,078,942 | A | C | 780 |
| chr7: 115982816 | 5.34E−03 | −0.038456 | 0.655241 | 115,982,816 | A | G | 781 |
| chr7: 115672912 | 5.76E−03 | 0.100123 | 0.966158 | 115,672,912 | C | G | 782 |
| chr7: 116726785 | 6.09E−03 | 0.14397 | 0.017624 | 116,726,785 | C | T | 783 |
| rs6972100 | 6.25E−03 | 0.083117 | 0.04035 | 115,453,169 | A | C | 784 |
| chr7: 115466739 | 6.30E−03 | 0.069172 | 0.074031 | 115,466,739 | C | G | 785 |
| rs12672236 | 6.86E−03 | −0.046099 | 0.874044 | 115,898,605 | C | T | 786 |
| rs11764503 | 6.96E−03 | −0.031646 | 0.635626 | 116,535,234 | C | T | 787 |
| rs6466590 | 7.00E−03 | −0.04474 | 0.864214 | 116,012,071 | A | G | 788 |
| chr7: 115893708 | 7.17E−03 | −0.038615 | 0.694191 | 115,893,708 | A | T | 789 |
| chr7: 115682046 | 7.22E−03 | −0.045384 | 0.842724 | 115,682,046 | A | G | 790 |
| chr7: 116207887 | 7.55E−03 | 0.214222 | 0.992604 | 116,207,887 | C | T | 791 |
| chr7: 115636229 | 7.71E−03 | −0.070345 | 0.068434 | 115,636,229 | A | T | 792 |
| chr7: 115677922 | 7.75E−03 | −0.097729 | 0.031561 | 115,677,922 | G | T | 793 |
| chr7: 115950410 | 7.84E−03 | −0.044993 | 0.225192 | 115,950,410 | A | G | 794 |
| chr7: 115612346 | 7.98E−03 | −0.110753 | 0.973984 | 115,612,346 | G | T | 795 |
| chr7: 116394850 | 8.39E−03 | 0.072819 | 0.946993 | 116,394,850 | A | G | 796 |
| chr7: 116379652 | 8.43E−03 | −0.072633 | 0.053849 | 116,379,652 | C | T | 797 |
| chr7: 116075041 | 8.61E−03 | 0.524549 | 0.002601 | 116,075,041 | C | T | 798 |
| rs62470782 | 8.62E−03 | −0.103333 | 0.971191 | 116,318,743 | C | T | 799 |
| chr7: 115356605 | 8.94E−03 | 0.178653 | 0.985919 | 115,356,605 | C | T | 800 |
| rs4428611 | 9.07E−03 | −0.047607 | 0.891208 | 115,639,217 | A | G | 801 |
| chr7: 115082501 | 9.13E−03 | −0.053039 | 0.102469 | 115,082,501 | C | T | 802 |
| rs56327526 | 9.20E−03 | 0.065348 | 0.920229 | 115,190,808 | A | G | 803 |
| chr7: 115285478 | 9.26E−03 | 0.13353 | 0.964525 | 115,285,478 | A | T | 804 |
| chr7: 116623036 | 9.31E−03 | 0.130759 | 0.015401 | 116,623,036 | A | T | 805 |
| chr7: 115908127 | 9.50E−03 | 0.042879 | 0.794818 | 115,908,127 | G | T | 806 |
| rs2191502 | 9.51E−03 | 0.043602 | 0.130565 | 116,005,322 | T | C | 807 |

TABLE 17
Association results for Atrial Fibrillation in a 2 Mb region flanking rs3807989 on
chromosome 7. Shown is marker identity, p-value of the association, odds ratio (OR), frequency
of effect allele in affecteds and controls, position in NCBI Build 36, identity of effect allele,
identity of other allele, and Seq ID for the marker. It should be noted that when reported OR
values are larger than unity, the effect allele is the at-risk allele, while, when reported OR values
are less than unity, the effect allele is the protective allele, and the other allele is the at-risk allele.
The OR value for the at-risk allele is in those cases equal to 1/OR for the protective (effect) allele.

| | | | | | | | other | SEQ ID |
|---|---|---|---|---|---|---|---|---|
| marker | P-value | OR | freq_aff | freq_ctl | position | eff all | all | NO: |
| chr7: 116669969 | 0.000103865 | 0.431109 | 0.006424 | 0.011496 | 116,669,969 | C | T | 536 |
| chr7: 116605565 | 0.00103852 | 2.507544 | 0.995069 | 0.991686 | 116,605,565 | A | G | 537 |
| chr7: 116568306 | 0.00122287 | 2.487908 | 0.995156 | 0.991839 | 116,568,306 | C | G | 538 |
| chr7: 116656715 | 0.00165339 | 1.339189 | 0.96116 | 0.952258 | 116,656,715 | A | T | 539 |
| chr7: 116195414 | 0.00234327 | 0.184039 | 0.000932 | 0.002721 | 116,195,414 | A | G | 540 |
| chr7: 116624142 | 0.0026901 | 0.786535 | 0.054158 | 0.06394 | 116,624,142 | C | T | 541 |
| chr7: 116688711 | 0.00445245 | 0.196572 | 0.001645 | 0.003297 | 116,688,711 | A | T | 542 |
| chr7: 116636691 | 0.00458699 | 1.576514 | 0.985833 | 0.981066 | 116,636,691 | A | G | 543 |
| rs10277181 | 0.0055339 | 0.865636 | 0.883742 | 0.897048 | 116,724,756 | A | G | 544 |
| chr7: 116727904 | 0.00561554 | 1.136674 | 0.153842 | 0.138876 | 116,727,904 | A | T | 545 |
| chr7: 116220710 | 0.00567687 | 1.872547 | 0.99529 | 0.991888 | 116,220,710 | C | T | 546 |
| chr7: 116360303 | 0.00587002 | 1.70985 | 0.99351 | 0.989624 | 116,360,303 | C | T | 547 |
| rs10227271 | 0.00593221 | 0.879954 | 0.848899 | 0.863705 | 116,727,284 | A | G | 548 |
| rs12540549 | 0.00597803 | 1.111004 | 0.546679 | 0.52841 | 115,982,768 | A | G | 549 |
| rs61658621 | 0.0065635 | 0.860958 | 0.151562 | 0.164285 | 115,247,528 | A | G | 550 |
| chr7: 116071363 | 0.00680798 | 1.570063 | 0.98624 | 0.981912 | 116,071,363 | G | T | 551 |
| chr7: 116487098 | 0.00693011 | 0.75238 | 0.964433 | 0.970715 | 116,487,098 | A | C | 552 |
| rs10487362 | 0.00740228 | 1.150262 | 0.112521 | 0.099771 | 116,716,301 | A | G | 553 |
| chr7: 116083983 | 0.00746422 | 1.561322 | 0.985958 | 0.98167 | 116,083,983 | C | T | 554 |
| chr7: 115195734 | 0.00764368 | 0.847674 | 0.211875 | 0.222885 | 115,195,734 | G | T | 555 |
| rs2301633 | 0.0077128 | 1.131493 | 0.150258 | 0.13587 | 116,725,256 | C | T | 556 |
| chr7: 116026350 | 0.00784374 | 0.479735 | 0.004731 | 0.007423 | 116,026,350 | G | T | 557 |
| chr7: 115702904 | 0.00840518 | 0.576684 | 0.009924 | 0.01332 | 115,702,904 | A | C | 558 |
| chr7: 115797367 | 0.00847545 | 1.755545 | 0.992686 | 0.98933 | 115,797,367 | C | T | 559 |
| chr7: 115466016 | 0.00881763 | 1.68701 | 0.98832 | 0.984781 | 115,466,016 | A | T | 560 |
| chr7: 115799374 | 0.0091131 | 1.724806 | 0.992252 | 0.988857 | 115,799,374 | C | T | 561 |
| rs3779545 | 0.00918261 | 0.872595 | 0.888709 | 0.901169 | 116,722,799 | A | G | 562 |
| rs17139625 | 0.00930474 | 1.145687 | 0.110947 | 0.098522 | 116,722,714 | A | G | 563 |
| chr7: 115647806 | 0.00946261 | 0.319209 | 0.005014 | 0.006628 | 115,647,806 | A | G | 564 |
| chr7: 116241296 | 0.00969249 | 0.80707 | 0.936658 | 0.944422 | 116,241,296 | C | T | 565 |
| chr7: 116195913 | 0.00975066 | 1.263714 | 0.968856 | 0.961396 | 116,195,913 | C | T | 566 |
| rs3779546 | 0.00980563 | 1.144476 | 0.110457 | 0.098096 | 116,721,436 | A | G | 567 |
| chr7: 116238188 | 0.00983466 | 1.459092 | 0.985191 | 0.980488 | 116,238,188 | A | C | 568 |
| chr7: 116183965 | 0.00990869 | 2.097491 | 0.997633 | 0.995072 | 116,183,965 | A | G | 569 |

TABLE 18
Association results for PR interval in a 2 Mb region flanking rs6795970 on
chromosome 3. Shown is marker identity, p-value of the association, magnitude of effect (in
units of fractions of standard deviations), frequency of effect allele, position in NCBI Build 36,
identity of effect allele, identity of other allele, SEQ ID for the marker. It should be noted that a
positive value for an effect represents an increase in the interval conferred by the effect allele,
while a negative value for the effect represents a decrease (i.e. the allele correlated with the
negative effect is predictive of a decreased value of the measure).

| | | | | | effect | other | |
|---|---|---|---|---|---|---|---|
| marker | p-value | effect | freq | position | allele | allele | SEQ ID NO: |
| rs7433306 | 2.57E−32 | 0.138568 | 0.362944 | 38,745,643 | C | G | 15 |
| rs6795970 | 3.03E−32 | 0.138971 | 0.36095 | 38,741,679 | A | G | 13 |
| rs6800541 | 4.44E−32 | 0.13716 | 0.363841 | 38,749,836 | C | T | 18 |
| rs6783110 | 5.72E−32 | 0.138292 | 0.359181 | 38,727,939 | A | G | 1527 |
| rs11924846 | 6.13E−32 | 0.138135 | 0.359263 | 38,731,570 | C | T | 5 |
| rs9820042 | 6.43E−32 | 0.136896 | 0.363935 | 38,754,120 | C | T | 1528 |
| rs9844577 | 7.75E−32 | −0.136961 | 0.637157 | 38,763,732 | A | C | 1529 |
| rs4076737 | 9.43E−32 | 0.13723 | 0.359175 | 38,739,786 | G | T | 10 |
| rs6599250 | 1.03E−31 | −0.136503 | 0.635957 | 38,759,033 | C | T | 20 |
| rs6599254 | 1.13E−31 | 0.13662 | 0.36327 | 38,770,559 | A | G | 23 |
| rs6599251 | 5.22E−31 | 0.133801 | 0.383888 | 38,760,813 | G | T | 21 |
| rs6790396 | 5.27E−31 | 0.134898 | 0.369591 | 38,746,929 | C | G | 17 |
| rs6801957 | 1.02E−30 | −0.134169 | 0.635242 | 38,742,319 | C | T | 14 |
| rs10428132 | 1.10E−30 | −0.133513 | 0.629702 | 38,752,558 | G | T | 1530 |
| rs7433723 | 1.23E−30 | −0.133688 | 0.630913 | 38,759,961 | A | G | 1531 |
| rs6599255 | 2.54E−30 | 0.133142 | 0.3701 | 38,771,419 | A | C | 24 |
| rs11711941 | 4.23E−29 | −0.130768 | 0.607063 | 38,753,544 | C | T | 1532 |
| rs13098827 | 5.31E−26 | 0.127634 | 0.365009 | 38,735,947 | A | G | 1533 |
| rs6798015 | 3.91E−24 | 0.123609 | 0.323672 | 38,773,840 | C | T | 26 |
| rs6599257 | 1.57E−23 | −0.130896 | 0.724409 | 38,779,592 | T | C | 33 |
| rs7428232 | 7.90E−21 | −0.11759 | 0.544782 | 38,753,622 | C | T | 1534 |
| rs7611456 | 1.98E−20 | 0.118899 | 0.280545 | 38,788,469 | C | T | 1535 |
| rs10212338 | 5.77E−20 | 0.115154 | 0.279278 | 38,787,654 | A | G | 37 |
| rs7651106 | 6.16E−20 | −0.114367 | 0.720684 | 38,779,345 | C | T | 32 |
| rs56040630 | 6.62E−20 | −0.114569 | 0.720867 | 38,785,529 | C | T | 1536 |
| rs4417808 | 6.64E−20 | 0.114543 | 0.279116 | 38,785,241 | A | G | 1537 |
| rs59669930 | 7.26E−20 | 0.114176 | 0.27906 | 38,781,515 | C | T | 1538 |
| rs7610489 | 7.27E−20 | 0.114172 | 0.27906 | 38,781,482 | A | G | 34 |
| rs12497173 | 7.48E−20 | 0.11406 | 0.279043 | 38,780,394 | G | T | 1539 |
| rs4420805 | 1.72E−19 | −0.117522 | 0.720896 | 38,789,237 | A | C | 1540 |
| rs9874436 | 7.15E−19 | 0.099617 | 0.474006 | 38,750,328 | C | G | 1541 |
| rs9311197 | 1.28E−18 | 0.099179 | 0.459247 | 38,751,607 | A | G | 1542 |
| rs9809798 | 1.38E−18 | 0.099013 | 0.459673 | 38,748,809 | A | C | 1543 |
| rs7428167 | 1.74E−18 | −0.098711 | 0.540286 | 38,753,195 | C | T | 1544 |
| rs59856101 | 1.02E−16 | 0.112609 | 0.246351 | 38,794,198 | A | C | 1545 |
| rs73064540 | 1.13E−16 | 0.112813 | 0.246011 | 38,796,286 | A | T | 1546 |
| rs13091192 | 1.43E−16 | 0.094574 | 0.427403 | 38,709,756 | A | G | 1547 |
| rs7430477 | 1.64E−16 | 0.09248 | 0.52152 | 38,740,494 | C | T | 12 |
| rs6599240 | 2.05E−16 | 0.092723 | 0.435855 | 38,713,721 | A | G | 1 |
| chr3: 38801183 | 2.46E−16 | −0.112765 | 0.753603 | 38,801,183 | A | G | 1548 |
| rs11129800 | 2.54E−16 | −0.092615 | 0.563857 | 38,719,374 | C | T | 2 |
| rs62244104 | 4.93E−15 | 0.099652 | 0.343389 | 38,789,222 | A | C | 1549 |
| rs7430438 | 5.82E−15 | −0.090951 | 0.608505 | 38,778,622 | A | G | 1550 |
| rs7617547 | 7.47E−15 | −0.089718 | 0.399087 | 38,738,504 | C | G | 8 |
| rs7430439 | 1.87E−14 | −0.089516 | 0.624811 | 38,778,643 | A | G | 31 |
| rs10428168 | 2.68E−13 | −0.084045 | 0.399892 | 38,755,063 | C | T | 1551 |
| rs7430451 | 2.93E−11 | 0.078447 | 0.660228 | 38,770,499 | C | G | 22 |
| rs11129801 | 3.07E−11 | −0.081662 | 0.308514 | 38,725,379 | A | G | 3 |
| rs12638572 | 6.58E−11 | 0.077193 | 0.664935 | 38,762,801 | A | G | 1552 |
| rs7615140 | 6.94E−11 | −0.077216 | 0.333662 | 38,757,030 | C | T | 19 |
| rs6599253 | 7.83E−11 | 0.07684 | 0.665049 | 38,769,364 | A | C | 1553 |
| rs6784303 | 7.83E−11 | 0.076844 | 0.665051 | 38,769,919 | C | T | 1554 |
| rs7432787 | 8.75E−11 | 0.079791 | 0.459274 | 38,778,334 | A | T | 1555 |
| rs6805187 | 1.51E−10 | −0.075405 | 0.347023 | 38,735,510 | A | C | 7 |
| rs9990137 | 1.54E−10 | 0.075374 | 0.652707 | 38,734,469 | A | G | 6 |
| rs11129799 | 8.26E−10 | 0.084663 | 0.783824 | 38,717,233 | C | T | 1556 |
| rs6599248 | 2.63E−09 | 0.082036 | 0.785716 | 38,724,030 | A | T | 1557 |
| rs7373065 | 3.33E−09 | 0.252193 | 0.975596 | 38,685,319 | C | T | 1558 |
| rs7638275 | 4.56E−09 | −0.25519 | 0.022746 | 38,640,827 | A | G | 1559 |
| rs11926158 | 4.62E−09 | −0.074351 | 0.333793 | 38,798,319 | C | G | 1560 |
| rs6599220 | 6.73E−09 | 0.263995 | 0.981567 | 38,612,998 | C | T | 1561 |
| rs7373492 | 7.93E−09 | 0.247222 | 0.976569 | 38,662,373 | C | T | 1562 |
| rs12490478 | 7.94E−09 | −0.072833 | 0.346668 | 38,792,703 | G | T | 1563 |
| rs7374540 | 8.19E−09 | −0.066793 | 0.625127 | 38,609,146 | A | C | 1564 |
| rs6773331 | 8.93E−09 | −0.246139 | 0.02334 | 38,659,401 | A | T | 1565 |
| rs9878604 | 1.61E−08 | 0.071265 | 0.669519 | 38,801,665 | C | T | 1566 |
| rs7373862 | 2.06E−08 | −0.073119 | 0.748851 | 38,609,347 | A | G | 1567 |
| rs6599219 | 2.53E−08 | −0.0727 | 0.749036 | 38,612,714 | A | G | 1568 |
| rs6764249 | 2.62E−08 | 0.091001 | 0.846459 | 38,705,121 | T | C | 1569 |
| rs6804918 | 3.27E−08 | −0.071234 | 0.714411 | 38,573,960 | A | G | 1570 |
| rs7645178 | 3.29E−08 | −0.07068 | 0.712714 | 38,572,562 | A | G | 1571 |
| rs12053903 | 3.31E−08 | 0.069586 | 0.278414 | 38,568,397 | C | T | 1572 |
| rs7373779 | 3.33E−08 | 0.069645 | 0.278326 | 38,568,947 | C | T | 1573 |
| rs9825762 | 3.44E−08 | 0.073895 | 0.764542 | 38,741,342 | T | C | 1574 |
| chr3: 38762560 | 3.84E−08 | 0.0822 | 0.659245 | 38,762,560 | A | G | 1575 |
| chr3: 38778336 | 3.90E−08 | 0.07997 | 0.764108 | 38,778,336 | A | T | 1576 |
| rs9824157 | 4.31E−08 | 0.071431 | 0.254027 | 38,608,694 | C | T | 1577 |
| rs6793245 | 4.93E−08 | 0.070352 | 0.276953 | 38,574,041 | A | G | 1578 |
| rs3924120 | 5.18E−08 | −0.071046 | 0.746142 | 38,611,159 | A | G | 1579 |
| rs12636123 | 5.65E−08 | −0.0709 | 0.412242 | 38,762,595 | G | T | 1580 |
| rs9828737 | 7.04E−08 | −0.06674 | 0.293123 | 38,751,702 | C | T | 1581 |
| rs13096893 | 8.02E−08 | −0.065963 | 0.296355 | 38,747,868 | A | G | 1582 |
| chr3: 38717393 | 8.35E−08 | 0.123147 | 0.091492 | 38,717,393 | A | G | 1583 |
| rs1805126 | 8.42E−08 | −0.064788 | 0.679109 | 38,567,410 | T | C | 1584 |
| rs9836859 | 8.70E−08 | 0.065874 | 0.702976 | 38,746,906 | C | G | 1585 |
| rs11710462 | 9.01E−08 | −0.065814 | 0.297253 | 38,745,994 | A | C | 1586 |
| rs11710461 | 9.01E−08 | 0.065814 | 0.702747 | 38,745,993 | C | G | 1587 |
| rs9830687 | 9.26E−08 | −0.065587 | 0.295986 | 38,755,975 | A | G | 1588 |
| rs11129803 | 1.08E−07 | −0.070964 | 0.234378 | 38,727,972 | C | T | 1589 |
| rs6799257 | 1.08E−07 | 0.06541 | 0.701792 | 38,742,607 | A | G | 1590 |
| rs6599249 | 1.08E−07 | −0.070907 | 0.234374 | 38,733,384 | A | G | 1591 |
| rs9818087 | 1.08E−07 | −0.070936 | 0.234379 | 38,729,280 | C | T | 1592 |
| rs6777775 | 1.09E−07 | −0.062703 | 0.581722 | 38,796,125 | A | G | 1593 |
| rs11928905 | 1.10E−07 | −0.070879 | 0.234328 | 38,731,502 | C | T | 1594 |
| rs6794914 | 1.11E−07 | 0.070847 | 0.765667 | 38,732,239 | C | T | 1595 |
| rs13319504 | 1.11E−07 | 0.065121 | 0.704231 | 38,762,755 | C | T | 1596 |
| rs9844265 | 1.14E−07 | 0.065055 | 0.704272 | 38,763,510 | C | T | 1597 |
| rs7430861 | 1.15E−07 | 0.065055 | 0.70431 | 38,764,582 | A | C | 1598 |
| rs9816817 | 1.15E−07 | 0.065061 | 0.704327 | 38,765,380 | A | G | 1599 |
| rs6809264 | 1.47E−07 | 0.064962 | 0.706258 | 38,775,767 | A | C | 1600 |
| rs3935184 | 1.51E−07 | 0.067581 | 0.260777 | 38,613,206 | C | G | 1601 |
| rs9847662 | 1.56E−07 | 0.06489 | 0.706668 | 38,776,649 | A | G | 1602 |
| rs6780103 | 1.95E−07 | −0.063366 | 0.311179 | 38,746,468 | A | G | 16 |
| rs9874633 | 1.99E−07 | 0.063283 | 0.689095 | 38,746,998 | A | G | 1603 |
| chr3: 38568132 | 2.01E−07 | 0.089392 | 0.202766 | 38,568,132 | G | T | 1604 |
| rs11129805 | 2.05E−07 | 0.063242 | 0.688916 | 38,745,950 | A | T | 1605 |
| chr3: 38725868 | 2.25E−07 | −0.159607 | 0.039683 | 38,725,868 | C | T | 1606 |
| rs11129802 | 3.10E−07 | 0.09172 | 0.889621 | 38,725,440 | C | T | 1607 |
| rs7430191 | 3.62E−07 | 0.077789 | 0.823635 | 38,629,028 | C | T | 1608 |
| chr3: 38595050 | 4.15E−07 | −0.259531 | 0.981488 | 38,595,050 | A | G | 1609 |
| rs12638536 | 4.89E−07 | 0.074335 | 0.712806 | 38,762,592 | A | C | 1610 |
| rs11705730 | 4.94E−07 | 0.064996 | 0.61091 | 38,789,238 | A | C | 1611 |
| rs6791171 | 5.13E−07 | 0.069515 | 0.788617 | 38,741,705 | C | T | 1612 |
| chr3: 38777576 | 5.17E−07 | 0.157471 | 0.959603 | 38,777,576 | G | T | 1613 |
| rs62244074 | 5.63E−07 | −0.065158 | 0.252353 | 38,778,904 | A | G | 1614 |
| rs62244075 | 5.63E−07 | −0.065163 | 0.25241 | 38,778,938 | C | G | 1615 |
| chr3: 38780863 | 5.86E−07 | −0.065175 | 0.253144 | 38,780,863 | A | G | 1616 |
| rs62244077 | 5.87E−07 | 0.06518 | 0.746846 | 38,781,392 | A | G | 1617 |
| rs11129807 | 5.90E−07 | −0.065195 | 0.253152 | 38,782,421 | A | T | 1618 |
| chr3: 38782569 | 5.91E−07 | 0.065203 | 0.746893 | 38,782,569 | A | G | 1619 |
| rs12635859 | 5.95E−07 | 0.065198 | 0.746804 | 38,783,890 | A | G | 1620 |
| rs12635869 | 5.96E−07 | 0.065199 | 0.746802 | 38,783,971 | A | G | 1621 |
| rs62244078 | 5.99E−07 | −0.065205 | 0.253202 | 38,784,646 | C | T | 1622 |
| rs62244080 | 6.07E−07 | −0.065211 | 0.253282 | 38,786,821 | A | G | 1623 |
| rs62244079 | 6.08E−07 | −0.065241 | 0.253159 | 38,786,782 | C | T | 1624 |
| rs62244081 | 6.35E−07 | −0.065264 | 0.253389 | 38,788,013 | C | T | 1625 |
| rs62244103 | 6.62E−07 | −0.065334 | 0.253575 | 38,788,933 | C | G | 1626 |
| rs58454174 | 7.18E−07 | 0.071179 | 0.803661 | 38,590,537 | C | T | 1627 |
| rs6599239 | 7.19E−07 | 0.097216 | 0.906361 | 38,712,988 | A | G | 1628 |
| rs6599238 | 7.28E−07 | 0.097309 | 0.906287 | 38,711,909 | A | G | 1629 |
| rs6599237 | 7.38E−07 | −0.097401 | 0.093791 | 38,710,782 | C | T | 1630 |
| rs6599242 | 7.39E−07 | −0.097003 | 0.093542 | 38,714,849 | A | G | 1631 |
| rs11710077 | 7.94E−07 | 0.076884 | 0.824592 | 38,632,903 | A | T | 1632 |
| rs6422143 | 8.87E−07 | −0.096483 | 0.092894 | 38,722,167 | C | G | 1633 |
| rs6599243 | 9.29E−07 | −0.095971 | 0.09321 | 38,722,281 | C | T | 1634 |
| rs6599245 | 9.43E−07 | 0.095901 | 0.906812 | 38,722,765 | C | G | 1635 |
| rs6599247 | 9.48E−07 | 0.095881 | 0.906818 | 38,722,876 | C | T | 1636 |
| chr3: 38772763 | 9.99E−07 | 0.344763 | 0.014542 | 38,772,763 | A | G | 1637 |
| rs12636153 | 1.01E−06 | 0.065194 | 0.760858 | 38,744,301 | A | C | 1638 |
| chr3: 38783400 | 1.02E−06 | 0.155906 | 0.961109 | 38,783,400 | C | T | 1639 |
| rs7430283 | 1.11E−06 | −0.095183 | 0.092981 | 38,724,619 | C | G | 1640 |
| rs41312411 | 1.13E−06 | −0.087888 | 0.888794 | 38,596,241 | C | G | 1641 |
| chr3: 38791169 | 1.15E−06 | −0.156111 | 0.038776 | 38,791,169 | A | G | 1642 |
| rs13095477 | 1.15E−06 | 0.069278 | 0.804079 | 38,780,692 | G | T | 1643 |
| chr3: 38792243 | 1.17E−06 | −0.15616 | 0.038754 | 38,792,243 | C | T | 1644 |
| rs13071311 | 1.17E−06 | 0.069341 | 0.804099 | 38,784,058 | G | T | 1645 |
| rs9843500 | 1.24E−06 | 0.059568 | 0.303238 | 38,563,099 | C | G | 1646 |
| rs7429945 | 1.24E−06 | 0.058785 | 0.310687 | 38,566,693 | C | T | 1647 |
| rs62244070 | 1.32E−06 | 0.065003 | 0.764885 | 38,773,175 | C | T | 1648 |
| rs12630795 | 1.44E−06 | 0.064753 | 0.765737 | 38,771,989 | A | G | 25 |
| rs6799868 | 1.48E−06 | 0.065007 | 0.258119 | 38,576,560 | C | T | 1649 |
| rs13087440 | 1.63E−06 | −0.070181 | 0.192574 | 38,752,855 | A | T | 1650 |
| rs4073796 | 1.67E−06 | 0.058594 | 0.304242 | 38,565,853 | A | G | 1651 |
| rs4073797 | 1.67E−06 | −0.058594 | 0.695758 | 38,565,854 | A | T | 1652 |
| chr3: 38614051 | 1.69E−06 | −0.249132 | 0.982837 | 38,614,051 | C | T | 1653 |
| rs73070981 | 1.76E−06 | 0.084932 | 0.121417 | 38,606,842 | C | T | 1654 |
| chr3: 38388644 | 2.11E−06 | 0.449605 | 0.992966 | 38,388,644 | A | T | 1655 |
| rs11720166 | 2.14E−06 | −0.065273 | 0.739489 | 38,574,816 | C | G | 1656 |
| rs34786326 | 2.22E−06 | 0.063741 | 0.770275 | 38,744,872 | C | T | 1657 |
| rs7355944 | 2.28E−06 | −0.067628 | 0.194552 | 38,601,197 | A | G | 1658 |
| rs11708996 | 2.48E−06 | 0.083757 | 0.12072 | 38,608,927 | C | G | 1659 |
| chr3: 38770376 | 2.50E−06 | −0.295309 | 0.014192 | 38,770,376 | A | G | 1660 |
| rs7617919 | 2.53E−06 | −0.062982 | 0.229628 | 38,768,993 | A | G | 1661 |
| rs62242444 | 2.55E−06 | 0.062975 | 0.770208 | 38,752,237 | C | T | 1662 |
| rs62242448 | 2.56E−06 | −0.06296 | 0.229753 | 38,755,623 | A | C | 1663 |
| rs60554541 | 2.56E−06 | 0.06295 | 0.770269 | 38,757,476 | A | G | 1664 |
| rs6599252 | 2.57E−06 | −0.062923 | 0.229653 | 38,764,695 | A | T | 1665 |
| rs60969309 | 2.58E−06 | −0.06291 | 0.229666 | 38,763,008 | C | T | 1666 |
| rs12634001 | 2.58E−06 | −0.062909 | 0.229659 | 38,763,702 | A | G | 1667 |
| rs57326399 | 2.59E−06 | −0.063197 | 0.233081 | 38,743,304 | C | T | 1668 |
| rs59468016 | 2.59E−06 | −0.063183 | 0.233104 | 38,743,251 | A | G | 1669 |
| rs59858965 | 2.64E−06 | 0.063097 | 0.76677 | 38,742,965 | A | C | 1670 |
| rs7432804 | 2.72E−06 | 0.059354 | 0.732109 | 38,778,513 | A | G | 30 |
| rs4414778 | 2.75E−06 | −0.059711 | 0.269836 | 38,787,169 | C | T | 36 |
| rs7641844 | 2.82E−06 | 0.060199 | 0.736415 | 38,777,255 | A | G | 29 |
| rs6599256 | 3.10E−06 | 0.060531 | 0.739804 | 38,776,229 | G | T | 28 |
| rs6763876 | 3.35E−06 | −0.060577 | 0.258382 | 38,775,751 | C | T | 27 |
| rs62244105 | 3.38E−06 | 0.060756 | 0.741276 | 38,789,587 | A | G | 1671 |
| rs73070977 | 3.67E−06 | 0.083248 | 0.111239 | 38,606,435 | G | T | 1672 |
| rs3922843 | 3.79E−06 | −0.061674 | 0.251481 | 38,599,347 | A | G | 1673 |
| chr3: 38800367 | 4.13E−06 | −0.292346 | 0.013685 | 38,800,367 | C | T | 1674 |
| chr3: 38598527 | 4.29E−06 | −0.312534 | 0.009649 | 38,598,527 | C | G | 1675 |
| rs7638909 | 4.52E−06 | 0.062476 | 0.251338 | 38,569,977 | G | T | 1676 |
| rs11710498 | 5.01E−06 | 0.062734 | 0.233457 | 38,551,669 | C | T | 1677 |
| chr3: 38754327 | 5.61E−06 | 0.080343 | 0.835683 | 38,754,327 | C | T | 1678 |
| rs6772948 | 5.77E−06 | −0.069251 | 0.831966 | 38,590,320 | C | T | 1679 |
| rs62245110 | 6.14E−06 | −0.064517 | 0.195859 | 38,605,315 | A | C | 1680 |
| chr3: 38298531 | 7.26E−06 | −0.360365 | 0.006302 | 38,298,531 | A | G | 1681 |
| chr3: 38817911 | 8.79E−06 | 0.155759 | 0.968449 | 38,817,911 | C | T | 1682 |
| chr3: 38822386 | 8.92E−06 | 0.155698 | 0.968499 | 38,822,386 | A | G | 1683 |
| rs7645358 | 9.27E−06 | −0.087631 | 0.90866 | 38,602,829 | A | G | 1684 |
| chr3: 38721228 | 9.62E−06 | 0.228954 | 0.015825 | 38,721,228 | C | T | 1685 |
| rs11129795 | 9.86E−06 | 0.060513 | 0.223435 | 38,564,167 | A | G | 1686 |
| rs62239356 | 9.97E−06 | 0.060543 | 0.223882 | 38,562,097 | C | T | 1687 |
| rs11717455 | 9.98E−06 | 0.075758 | 0.854339 | 38,818,651 | T | C | 1688 |
| rs35231307 | 1.03E−05 | −0.060388 | 0.776282 | 38,564,412 | C | T | 1689 |
| rs41315485 | 1.04E−05 | −0.061345 | 0.767815 | 38,565,279 | A | G | 1690 |
| rs56283404 | 1.06E−05 | 0.060356 | 0.223353 | 38,561,710 | A | C | 1691 |
| rs12490047 | 1.07E−05 | −0.060336 | 0.776656 | 38,561,419 | C | G | 1692 |
| rs34519218 | 1.18E−05 | −0.085296 | 0.908353 | 38,599,846 | C | T | 1693 |
| rs55981643 | 1.20E−05 | −0.062353 | 0.195307 | 38,606,959 | A | G | 1694 |
| rs71323670 | 1.20E−05 | 0.085124 | 0.091768 | 38,600,158 | C | T | 1695 |
| rs6771881 | 1.26E−05 | −0.060009 | 0.776836 | 38,553,268 | A | G | 1696 |
| rs10154914 | 1.33E−05 | −0.061983 | 0.195228 | 38,607,634 | A | T | 1697 |
| rs12497866 | 1.38E−05 | −0.059784 | 0.776514 | 38,550,869 | C | T | 1698 |
| rs7432766 | 1.38E−05 | 0.084137 | 0.092183 | 38,601,932 | C | T | 1699 |
| rs1473804 | 1.39E−05 | −0.059756 | 0.776438 | 38,551,394 | C | T | 1700 |
| rs9311191 | 1.39E−05 | −0.061805 | 0.195189 | 38,608,114 | C | T | 1701 |
| rs61669000 | 1.43E−05 | 0.083864 | 0.092353 | 38,607,439 | C | T | 1702 |
| chr3: 38803994 | 1.52E−05 | 0.091157 | 0.870292 | 38,803,994 | C | T | 1703 |
| rs7373373 | 1.56E−05 | −0.082416 | 0.09272 | 38,732,380 | A | G | 1704 |
| rs7374599 | 1.56E−05 | −0.082416 | 0.09272 | 38,732,298 | C | T | 1705 |
| rs62242433 | 1.56E−05 | −0.082419 | 0.092713 | 38,732,525 | G | T | 1706 |
| chr3: 38731330 | 1.57E−05 | −0.082413 | 0.092708 | 38,731,330 | A | G | 1707 |
| rs62242432 | 1.57E−05 | −0.082413 | 0.092708 | 38,731,322 | C | T | 1708 |
| rs62242429 | 1.59E−05 | −0.082406 | 0.092674 | 38,728,334 | C | T | 1709 |
| rs62242399 | 1.59E−05 | −0.082406 | 0.092672 | 38,728,180 | A | G | 1710 |
| chr3: 38642561 | 1.60E−05 | −0.510884 | 0.006198 | 38,642,561 | A | G | 1711 |
| rs9311192 | 1.64E−05 | 0.061301 | 0.804968 | 38,609,615 | C | T | 1712 |
| rs9311194 | 1.69E−05 | −0.061218 | 0.195007 | 38,610,076 | A | G | 1713 |
| rs13084981 | 1.73E−05 | −0.083515 | 0.907089 | 38,621,003 | C | T | 1714 |
| rs34535972 | 1.73E−05 | −0.083492 | 0.907087 | 38,620,756 | A | G | 1715 |
| rs11721012 | 1.76E−05 | −0.061082 | 0.194968 | 38,610,878 | A | G | 1716 |
| rs1473805 | 1.81E−05 | −0.058949 | 0.775038 | 38,552,683 | A | G | 1717 |
| rs62242438 | 1.90E−05 | −0.056226 | 0.242986 | 38,741,352 | C | T | 1718 |
| rs62242436 | 1.91E−05 | 0.082365 | 0.907997 | 38,737,592 | C | T | 1719 |
| rs10212202 | 2.04E−05 | −0.060604 | 0.194835 | 38,613,394 | C | G | 1720 |
| rs12632942 | 2.06E−05 | 0.055927 | 0.758469 | 38,740,002 | A | G | 11 |
| rs61487238 | 2.09E−05 | 0.055925 | 0.758316 | 38,739,075 | C | T | 1721 |
| rs6771157 | 2.11E−05 | −0.055912 | 0.241736 | 38,738,867 | C | G | 9 |
| rs11710006 | 2.14E−05 | 0.056012 | 0.757762 | 38,727,794 | A | T | 4 |
| rs62242430 | 2.15E−05 | −0.055997 | 0.242208 | 38,729,180 | C | T | 1722 |
| rs62242435 | 2.15E−05 | −0.055964 | 0.242103 | 38,734,621 | A | G | 1723 |
| rs6781740 | 2.15E−05 | 0.055994 | 0.757796 | 38,728,981 | C | T | 1724 |
| chr3: 38701029 | 2.17E−05 | 0.625406 | 0.005272 | 38,701,029 | C | T | 1725 |
| rs61014925 | 2.18E−05 | 0.055954 | 0.757898 | 38,730,904 | A | G | 1726 |
| rs62242434 | 2.23E−05 | 0.055868 | 0.757732 | 38,734,533 | C | T | 1727 |
| rs55872442 | 2.25E−05 | 0.05819 | 0.226204 | 38,556,439 | A | G | 1728 |
| chr3: 38060947 | 2.40E−05 | −0.638075 | 0.006376 | 38,060,947 | A | G | 1729 |
| chr3: 38062521 | 2.42E−05 | −0.124313 | 0.041126 | 38,062,521 | A | C | 1730 |
| rs12635898 | 2.44E−05 | 0.110774 | 0.082952 | 38,601,069 | A | C | 1731 |
| rs9833775 | 2.65E−05 | 0.059706 | 0.805395 | 38,616,088 | C | T | 1732 |
| rs12491987 | 2.66E−05 | 0.083487 | 0.867744 | 38,624,048 | C | T | 1733 |
| chr3: 38128284 | 2.73E−05 | −0.12351 | 0.04117 | 38,128,284 | A | C | 1734 |
| rs55880069 | 2.87E−05 | 0.057291 | 0.227407 | 38,558,045 | C | T | 1735 |
| rs7374030 | 2.92E−05 | 0.085551 | 0.915396 | 38,772,932 | C | T | 1736 |
| rs7428779 | 2.96E−05 | −0.060177 | 0.189218 | 38,621,427 | T | C | 1737 |
| chr3: 39103060 | 3.27E−05 | 0.186406 | 0.977873 | 39,103,060 | A | G | 1738 |
| rs55849713 | 3.37E−05 | 0.080788 | 0.910167 | 38,769,902 | C | T | 1739 |
| rs12054245 | 3.43E−05 | 0.080419 | 0.909662 | 38,766,511 | C | T | 1740 |
| rs58802016 | 3.43E−05 | −0.080423 | 0.090277 | 38,767,581 | C | T | 1741 |
| chr3: 38764592 | 3.43E−05 | −0.080409 | 0.090448 | 38,764,592 | A | G | 1742 |
| rs7373595 | 3.43E−05 | −0.08044 | 0.090211 | 38,768,463 | A | T | 1743 |
| rs11129804 | 3.51E−05 | 0.077324 | 0.898155 | 38,741,829 | A | G | 1744 |
| chr3: 38265547 | 3.53E−05 | 0.63025 | 0.993638 | 38,265,547 | C | T | 1745 |
| rs62242453 | 3.55E−05 | 0.080268 | 0.909444 | 38,762,112 | C | T | 1746 |
| rs6762565 | 3.78E−05 | −0.056298 | 0.771542 | 38,557,195 | C | T | 1747 |
| rs41312433 | 3.87E−05 | 0.059273 | 0.810742 | 38,622,646 | G | T | 1748 |
| rs10865879 | 3.90E−05 | −0.056259 | 0.771705 | 38,552,366 | A | C | 1749 |
| chr3: 38751420 | 4.05E−05 | 0.080128 | 0.910483 | 38,751,420 | C | T | 1750 |
| rs62242443 | 4.11E−05 | −0.080032 | 0.089468 | 38,749,915 | C | T | 1751 |
| rs11129806 | 4.14E−05 | 0.080131 | 0.910627 | 38,757,741 | C | T | 1752 |
| rs6781009 | 4.15E−05 | 0.054922 | 0.236685 | 38,560,438 | C | T | 1753 |
| chr3: 38753692 | 4.15E−05 | 0.080047 | 0.910607 | 38,753,692 | C | T | 1754 |
| rs62242446 | 4.17E−05 | −0.080052 | 0.089364 | 38,755,194 | C | T | 1755 |
| rs62242447 | 4.17E−05 | −0.080053 | 0.089356 | 38,755,570 | C | T | 1756 |
| rs7426951 | 4.19E−05 | 0.08006 | 0.910678 | 38,757,297 | A | G | 1757 |
| rs3923697 | 4.19E−05 | −0.08006 | 0.089316 | 38,757,574 | A | G | 1758 |
| rs62242450 | 4.20E−05 | 0.080063 | 0.910695 | 38,758,165 | A | G | 1759 |
| rs6599236 | 4.36E−05 | 0.077024 | 0.886067 | 38,710,164 | A | G | 1760 |
| rs7374804 | 4.43E−05 | −0.07934 | 0.089935 | 38,743,338 | C | T | 1761 |
| chr3: 38765921 | 4.52E−05 | 0.208937 | 0.014526 | 38,765,921 | A | C | 1762 |
| chr3: 38297989 | 4.61E−05 | 0.681089 | 0.993441 | 38,297,989 | A | G | 1763 |
| rs11711602 | 4.68E−05 | 0.058089 | 0.809355 | 38,622,051 | C | T | 1764 |
| chr3: 39000860 | 4.71E−05 | 0.182537 | 0.977603 | 39,000,860 | A | G | 1765 |
| rs4420804 | 5.14E−05 | 0.045988 | 0.549449 | 38,787,712 | C | T | 1766 |
| rs11917835 | 5.20E−05 | −0.045809 | 0.451031 | 38,785,355 | A | G | 1767 |
| rs4676479 | 5.25E−05 | −0.045732 | 0.451168 | 38,783,037 | A | G | 1768 |
| rs7433352 | 5.32E−05 | 0.045629 | 0.548689 | 38,779,672 | A | C | 1769 |
| rs4676596 | 5.33E−05 | 0.045779 | 0.549266 | 38,785,701 | C | T | 1770 |
| chr3: 38742425 | 5.44E−05 | −0.11454 | 0.939981 | 38,742,425 | A | G | 1771 |
| rs6803189 | 5.48E−05 | −0.073395 | 0.105084 | 38,732,870 | C | T | 1772 |
| rs6802294 | 5.66E−05 | 0.073347 | 0.894998 | 38,734,826 | C | G | 1773 |
| chr3: 39231916 | 5.70E−05 | −0.177438 | 0.02171 | 39,231,916 | C | G | 1774 |
| chr3: 39249243 | 6.28E−05 | 0.175851 | 0.977845 | 39,249,243 | A | G | 1775 |
| chr3: 38979166 | 6.49E−05 | 0.180355 | 0.978204 | 38,979,166 | A | G | 1776 |
| rs7431144 | 6.56E−05 | 0.080016 | 0.904812 | 38,769,272 | T | C | 1777 |
| rs2364658 | 7.05E−05 | −0.046512 | 0.610214 | 37,764,386 | C | G | 1778 |
| rs9833086 | 7.09E−05 | −0.050013 | 0.695848 | 38,585,475 | A | G | 1779 |
| rs4395346 | 7.11E−05 | 0.049721 | 0.603072 | 38,826,088 | T | C | 1780 |
| rs4622847 | 7.12E−05 | −0.051223 | 0.291505 | 38,799,347 | A | G | 1781 |
| rs13085808 | 8.45E−05 | −0.066077 | 0.141233 | 38,804,274 | A | G | 1782 |
| chr3: 38779878 | 8.48E−05 | 0.199302 | 0.014225 | 38,779,878 | C | T | 1783 |
| rs73826324 | 9.62E−05 | 0.075615 | 0.904425 | 38,762,381 | A | G | 1784 |
| chr3: 38062226 | 9.64E−05 | 0.531336 | 0.99311 | 38,062,226 | C | T | 1785 |
| chr3: 38601173 | 9.80E−05 | −0.098198 | 0.079393 | 38,601,173 | A | G | 1786 |
| chr3: 38300452 | 1.03E−04 | 0.154628 | 0.965923 | 38,300,452 | A | G | 1787 |
| rs4130467 | 1.06E−04 | 0.0484 | 0.279216 | 38,586,708 | C | T | 1788 |
| rs9861242 | 1.10E−04 | 0.05323 | 0.218534 | 38,584,338 | A | G | 1789 |
| chr3: 37850981 | 1.14E−04 | 0.118446 | 0.960693 | 37,850,981 | C | T | 1790 |
| chr3: 38197176 | 1.17E−04 | 0.15315 | 0.966148 | 38,197,176 | C | T | 1791 |
| rs11713291 | 1.20E−04 | −0.075828 | 0.106248 | 38,061,467 | A | G | 1792 |
| rs11708345 | 1.21E−04 | 0.075717 | 0.893644 | 38,076,426 | C | T | 1793 |
| rs12631535 | 1.23E−04 | 0.054312 | 0.78803 | 38,706,121 | T | C | 1794 |
| rs4131778 | 1.29E−04 | −0.048078 | 0.721166 | 38,587,230 | A | T | 1795 |
| chr3: 38779651 | 1.37E−04 | 0.187341 | 0.982733 | 38,779,651 | C | T | 1796 |
| rs34418780 | 1.44E−04 | 0.083078 | 0.923539 | 38,909,550 | A | T | 1797 |
| chr3: 38048625 | 1.44E−04 | 0.550659 | 0.993517 | 38,048,625 | G | T | 1798 |
| rs60721494 | 1.49E−04 | 0.063956 | 0.866777 | 38,008,075 | G | T | 1799 |
| chr3: 38699887 | 1.51E−04 | −0.907248 | 0.996079 | 38,699,887 | C | T | 1800 |
| rs9845438 | 1.56E−04 | −0.057428 | 0.801105 | 38,575,460 | A | C | 1801 |
| chr3: 38678925 | 1.58E−04 | 0.203091 | 0.018207 | 38,678,925 | A | G | 1802 |
| rs28829975 | 1.72E−04 | −0.048831 | 0.709491 | 39,485,675 | A | G | 1803 |
| chr3: 38758496 | 1.80E−04 | −0.116817 | 0.044034 | 38,758,496 | C | T | 1804 |
| rs3922844 | 1.83E−04 | 0.044832 | 0.6762 | 38,599,257 | C | T | 1805 |
| rs73058503 | 1.89E−04 | −0.075511 | 0.910914 | 39,222,289 | A | G | 1806 |
| rs7620883 | 1.90E−04 | 0.050707 | 0.221489 | 38,589,484 | A | G | 1807 |
| rs9880327 | 1.98E−04 | −0.047752 | 0.265034 | 38,657,897 | A | G | 1808 |
| rs11711062 | 2.05E−04 | 0.332663 | 0.992064 | 38,728,736 | A | T | 1809 |
| rs9856387 | 2.05E−04 | 0.047761 | 0.735989 | 38,662,230 | C | T | 1810 |
| chr3: 38903936 | 2.07E−04 | −0.054206 | 0.41857 | 38,903,936 | G | T | 1811 |
| rs11712354 | 2.24E−04 | 0.060352 | 0.85916 | 38,810,892 | A | C | 1812 |
| rs11709828 | 2.26E−04 | −0.060307 | 0.140827 | 38,811,865 | C | T | 1813 |
| rs11721285 | 2.26E−04 | −0.060309 | 0.140817 | 38,811,576 | A | G | 1814 |
| chr3: 38812178 | 2.27E−04 | 0.060278 | 0.859196 | 38,812,178 | C | T | 1815 |
| rs9843296 | 2.30E−04 | −0.060009 | 0.141691 | 38,018,908 | C | T | 1816 |
| rs13075748 | 2.32E−04 | 0.060161 | 0.859242 | 38,814,393 | C | T | 1817 |
| rs62243862 | 2.37E−04 | −0.051902 | 0.201294 | 38,716,553 | C | T | 1818 |
| chr3: 38598253 | 2.38E−04 | 0.230967 | 0.977627 | 38,598,253 | C | T | 1819 |
| rs3922578 | 2.49E−04 | 0.06124 | 0.859413 | 38,836,126 | A | G | 1820 |
| rs6599244 | 2.51E−04 | 0.063679 | 0.875324 | 38,722,739 | A | G | 1821 |
| rs11718422 | 2.53E−04 | −0.059811 | 0.140555 | 38,834,190 | A | G | 1822 |
| rs11708296 | 2.53E−04 | 0.05977 | 0.85945 | 38,832,069 | A | G | 1823 |
| rs6804644 | 2.53E−04 | −0.059785 | 0.140552 | 38,833,051 | C | T | 1824 |
| rs6798701 | 2.53E−04 | 0.059772 | 0.859445 | 38,832,379 | A | G | 1825 |
| rs11713967 | 2.54E−04 | 0.059635 | 0.859446 | 38,830,277 | C | T | 1826 |
| rs11717588 | 2.54E−04 | 0.059631 | 0.859446 | 38,828,164 | C | T | 1827 |
| rs4528881 | 2.54E−04 | 0.059627 | 0.859448 | 38,823,410 | A | G | 1828 |
| chr3: 38823059 | 2.54E−04 | −0.059626 | 0.140552 | 38,823,059 | A | T | 1829 |
| rs13080911 | 2.54E−04 | 0.059624 | 0.859449 | 38,820,925 | A | G | 1830 |
| rs13061068 | 2.54E−04 | −0.059624 | 0.140551 | 38,820,915 | G | T | 1831 |
| rs35257385 | 2.54E−04 | −0.059624 | 0.140551 | 38,820,730 | A | G | 1832 |
| rs11713473 | 2.55E−04 | −0.059613 | 0.140543 | 38,818,967 | A | G | 1833 |
| rs11713400 | 2.55E−04 | 0.059612 | 0.859457 | 38,818,891 | C | T | 1834 |
| chr3: 38512241 | 2.59E−04 | 0.108613 | 0.046847 | 38,512,241 | A | G | 1835 |
| chr3: 39449599 | 2.64E−04 | 0.099382 | 0.061678 | 39,449,599 | C | T | 1836 |
| chr3: 38100896 | 2.65E−04 | −0.055714 | 0.709063 | 38,100,896 | A | G | 1837 |
| rs41314746 | 2.67E−04 | 0.234942 | 0.983996 | 38,650,719 | C | T | 1838 |
| rs7430323 | 2.72E−04 | 0.066142 | 0.894595 | 38,763,488 | A | G | 1839 |
| rs11719241 | 2.73E−04 | 0.059857 | 0.854074 | 38,810,088 | G | T | 1840 |
| rs3923696 | 2.74E−04 | −0.066616 | 0.10393 | 38,757,197 | A | T | 1841 |
| chr3: 38080491 | 2.81E−04 | −0.054471 | 0.647449 | 38,080,491 | C | T | 1842 |
| rs9842880 | 2.82E−04 | −0.058249 | 0.152469 | 38,027,617 | C | G | 1843 |
| rs58141279 | 2.83E−04 | −0.066461 | 0.103956 | 38,758,205 | C | G | 1844 |
| rs60847476 | 2.84E−04 | −0.066435 | 0.10396 | 38,758,369 | A | G | 1845 |
| rs6599233 | 2.84E−04 | 0.046062 | 0.721856 | 38,687,884 | C | T | 1846 |
| rs56206213 | 2.91E−04 | −0.065787 | 0.105383 | 38,765,835 | C | T | 1847 |
| chr3: 38819804 | 2.93E−04 | 0.072804 | 0.901423 | 38,819,804 | C | T | 1848 |
| chr3: 38774863 | 2.96E−04 | −0.181312 | 0.974528 | 38,774,863 | C | T | 1849 |
| rs7372391 | 2.96E−04 | −0.0606 | 0.137626 | 38,712,647 | C | T | 1850 |
| rs57803396 | 3.03E−04 | −0.065574 | 0.105355 | 38,767,092 | A | G | 1851 |
| rs56654680 | 3.05E−04 | 0.065526 | 0.894649 | 38,767,384 | A | T | 1852 |
| rs9758003 | 3.12E−04 | −0.05829 | 0.151993 | 38,028,210 | C | T | 1853 |
| chr3: 38709166 | 3.21E−04 | 0.059943 | 0.858517 | 38,709,166 | A | G | 1854 |
| rs9311175 | 3.30E−04 | −0.059065 | 0.141967 | 38,022,215 | C | G | 1855 |
| rs62242857 | 3.31E−04 | 0.059706 | 0.857718 | 38,708,421 | A | G | 1856 |
| rs3796387 | 3.31E−04 | 0.055572 | 0.171953 | 38,554,211 | A | G | 1857 |
| chr3: 38903943 | 3.33E−04 | 0.066871 | 0.825078 | 38,903,943 | A | G | 1858 |
| chr3: 38519917 | 3.35E−04 | 0.145876 | 0.02794 | 38,519,917 | A | C | 1859 |
| chr3: 38782784 | 3.36E−04 | −0.202091 | 0.979847 | 38,782,784 | A | C | 1860 |
| rs62244073 | 3.37E−04 | −0.058603 | 0.699527 | 38,778,361 | A | G | 1861 |
| chr3: 38016350 | 3.38E−04 | −0.058767 | 0.139859 | 38,016,350 | A | G | 1862 |
| rs12631918 | 3.51E−04 | −0.040934 | 0.466961 | 38,785,796 | C | T | 1863 |
| rs4676592 | 3.53E−04 | −0.053077 | 0.182793 | 38,839,941 | A | G | 1864 |
| rs62243861 | 3.63E−04 | −0.059798 | 0.136087 | 38,715,301 | A | G | 1865 |
| rs11714394 | 3.69E−04 | −0.059736 | 0.136057 | 38,715,416 | G | T | 1866 |
| rs62242859 | 3.73E−04 | 0.050368 | 0.800065 | 38,712,327 | C | T | 1867 |
| rs7432727 | 3.76E−04 | 0.040785 | 0.576485 | 38,774,400 | C | T | 1868 |
| chr3: 38661502 | 3.79E−04 | −0.091474 | 0.097432 | 38,661,502 | C | G | 1869 |
| rs4676594 | 3.93E−04 | 0.058723 | 0.861981 | 38,806,006 | G | T | 1870 |
| rs62241189 | 3.95E−04 | −0.07126 | 0.155663 | 38,581,750 | A | G | 1871 |
| rs3935472 | 3.97E−04 | 0.077452 | 0.097265 | 38,577,859 | A | G | 1872 |
| rs7648182 | 4.01E−04 | −0.055698 | 0.166108 | 38,010,512 | A | G | 1873 |
| rs7641519 | 4.06E−04 | 0.055302 | 0.843731 | 38,014,306 | C | T | 1874 |
| rs6809649 | 4.11E−04 | −0.055259 | 0.156261 | 38,013,986 | C | T | 1875 |
| rs62242814 | 4.27E−04 | −0.16577 | 0.021081 | 38,670,875 | A | G | 1876 |
| rs11715511 | 4.36E−04 | 0.055342 | 0.84243 | 38,001,918 | T | C | 1877 |
| rs12639182 | 4.40E−04 | 0.049774 | 0.800504 | 38,711,234 | C | T | 1878 |
| chr3: 38025163 | 4.49E−04 | −0.058079 | 0.13994 | 38,025,163 | A | G | 1879 |
| chr3: 37980243 | 4.84E−04 | 0.071709 | 0.916606 | 37,980,243 | A | G | 1880 |
| rs11715346 | 4.88E−04 | −0.058196 | 0.137128 | 38,817,026 | C | T | 1881 |
| rs9812912 | 4.91E−04 | 0.069795 | 0.845333 | 38,582,233 | C | T | 1882 |
| rs41276521 | 5.00E−04 | 0.071524 | 0.916647 | 37,985,831 | A | C | 1883 |
| rs11707277 | 5.27E−04 | −0.057375 | 0.139228 | 38,022,684 | A | G | 1884 |
| chr3: 38970944 | 5.28E−04 | −0.06503 | 0.170668 | 38,970,944 | G | T | 1885 |
| rs6808011 | 5.38E−04 | −0.054307 | 0.155257 | 38,011,918 | C | T | 1886 |
| rs59658035 | 5.43E−04 | 0.054273 | 0.844736 | 38,011,702 | A | G | 1887 |
| rs7611147 | 5.49E−04 | 0.054093 | 0.843805 | 38,006,376 | A | C | 1888 |
| chr3: 38659082 | 5.58E−04 | 0.189345 | 0.987583 | 38,659,082 | C | T | 1889 |
| rs62241530 | 5.60E−04 | −0.230905 | 0.012083 | 37,757,322 | A | G | 1890 |
| rs6776034 | 5.68E−04 | 0.085483 | 0.086042 | 38,754,193 | A | T | 1891 |
| rs62243860 | 5.75E−04 | −0.059308 | 0.124371 | 38,713,161 | C | T | 1892 |
| chr3: 39387876 | 6.05E−04 | −0.318357 | 0.987019 | 39,387,876 | C | T | 1893 |
| chr3: 39338381 | 6.24E−04 | 0.112552 | 0.036607 | 39,338,381 | A | G | 1894 |
| rs704941 | 6.29E−04 | 0.052198 | 0.188681 | 38,381,482 | A | G | 1895 |
| rs62242856 | 6.45E−04 | 0.058253 | 0.870202 | 38,708,250 | A | G | 1896 |
| rs11711097 | 6.48E−04 | 0.046274 | 0.21536 | 38,603,646 | A | G | 1897 |
| rs11922163 | 6.51E−04 | −0.053432 | 0.159536 | 38,003,855 | A | G | 1898 |
| rs9868464 | 6.54E−04 | 0.199174 | 0.988638 | 38,904,262 | C | T | 1899 |
| chr3: 38021473 | 6.57E−04 | 0.056401 | 0.861856 | 38,021,473 | C | T | 1900 |
| chr3: 38766563 | 6.69E−04 | −0.372385 | 0.988562 | 38,766,563 | C | T | 1901 |
| chr3: 38019729 | 6.70E−04 | −0.420892 | 0.006897 | 38,019,729 | A | G | 1902 |
| rs11715803 | 6.82E−04 | 0.053323 | 0.844785 | 38,006,024 | C | G | 1903 |
| rs6550514 | 6.97E−04 | 0.052991 | 0.838456 | 38,014,191 | C | T | 1904 |
| rs35710839 | 7.10E−04 | −0.126708 | 0.963133 | 38,720,820 | C | G | 1905 |
| chr3: 38518987 | 7.13E−04 | −0.404703 | 0.007668 | 38,518,987 | G | T | 1906 |
| rs11712625 | 7.15E−04 | 0.052935 | 0.843863 | 38,003,349 | C | T | 1907 |
| rs9875610 | 7.32E−04 | 0.040934 | 0.398496 | 38,805,121 | A | G | 1908 |
| rs9851724 | 7.39E−04 | 0.04346 | 0.718205 | 38,694,939 | T | C | 1909 |
| rs4131768 | 7.47E−04 | 0.042708 | 0.720193 | 38,670,178 | A | G | 1910 |
| rs56264852 | 7.55E−04 | 0.053016 | 0.845287 | 38,005,571 | G | T | 1911 |
| rs12637451 | 7.56E−04 | 0.064053 | 0.100708 | 39,222,662 | C | G | 1912 |
| rs7641182 | 7.57E−04 | 0.110356 | 0.035177 | 39,382,446 | C | T | 1913 |
| rs2201966 | 7.58E−04 | 0.110261 | 0.035135 | 39,381,029 | C | T | 1914 |
| rs6766291 | 7.59E−04 | −0.110662 | 0.964691 | 39,388,814 | C | T | 1915 |
| rs9813465 | 7.60E−04 | 0.064038 | 0.100596 | 39,222,999 | C | T | 1916 |
| rs7611087 | 7.61E−04 | −0.110315 | 0.964854 | 39,382,566 | A | T | 1917 |
| rs12632771 | 7.63E−04 | −0.063988 | 0.899441 | 39,223,856 | A | G | 1918 |
| rs6782237 | 7.64E−04 | 0.04263 | 0.720125 | 38,671,557 | C | G | 1919 |
| rs13320742 | 7.65E−04 | −0.110331 | 0.964864 | 39,383,818 | A | G | 1920 |
| rs13313922 | 7.80E−04 | −0.063871 | 0.899593 | 39,225,755 | C | T | 1921 |
| rs9809830 | 7.85E−04 | −0.063838 | 0.899629 | 39,226,145 | C | G | 1922 |
| rs9682325 | 7.87E−04 | 0.110195 | 0.03583 | 39,384,700 | C | T | 1923 |
| rs6764150 | 8.00E−04 | 0.094093 | 0.046719 | 39,383,318 | A | T | 1924 |
| chr3: 38920693 | 8.04E−04 | 0.195615 | 0.987696 | 38,920,693 | C | T | 1925 |
| rs6810361 | 8.06E−04 | 0.053876 | 0.164832 | 38,549,972 | C | T | 1926 |
| chr3: 38919280 | 8.06E−04 | −0.195565 | 0.012329 | 38,919,280 | A | G | 1927 |
| rs6599234 | 8.14E−04 | −0.041584 | 0.29089 | 38,690,304 | A | T | 1928 |
| chr3: 38965331 | 8.16E−04 | −0.195295 | 0.012403 | 38,965,331 | C | T | 1929 |
| chr3: 38938485 | 8.18E−04 | 0.195277 | 0.98763 | 38,938,485 | G | T | 1930 |
| rs12636775 | 8.21E−04 | −0.063622 | 0.899828 | 39,229,388 | A | G | 1931 |
| rs6599232 | 8.22E−04 | −0.042473 | 0.280398 | 38,674,764 | C | T | 1932 |
| chr3: 39120020 | 8.23E−04 | −0.195285 | 0.012477 | 39,120,020 | A | G | 1933 |
| chr3: 39090420 | 8.37E−04 | 0.194906 | 0.987549 | 39,090,420 | A | G | 1934 |
| rs73825452 | 8.46E−04 | −0.05237 | 0.155205 | 38,003,618 | A | G | 1935 |
| rs2133581 | 8.81E−04 | 0.112643 | 0.033776 | 39,381,427 | A | G | 1936 |
| rs11719260 | 9.00E−04 | 0.051861 | 0.843914 | 38,002,105 | A | G | 1937 |
| rs11711286 | 9.27E−04 | 0.051742 | 0.843912 | 38,001,656 | C | T | 1938 |
| rs73825449 | 9.32E−04 | −0.051726 | 0.156146 | 38,000,995 | A | G | 1939 |
| rs3922579 | 9.42E−04 | 0.053662 | 0.843232 | 38,836,277 | A | C | 1940 |
| rs61558743 | 9.48E−04 | −0.045376 | 0.79004 | 38,606,859 | A | G | 1941 |
| rs11709029 | 9.50E−04 | 0.05167 | 0.843762 | 37,999,424 | C | T | 1942 |
| rs11129775 | 9.50E−04 | 0.051669 | 0.843761 | 37,999,412 | C | T | 1943 |
| chr3: 39002755 | 9.53E−04 | 0.092386 | 0.954045 | 39,002,755 | C | T | 1944 |
| rs7430391 | 9.61E−04 | −0.041509 | 0.290387 | 38,698,971 | A | G | 1945 |
| rs73067126 | 9.69E−04 | 0.073902 | 0.144308 | 38,561,041 | A | C | 1946 |
| chr3: 39595718 | 9.75E−04 | −0.234545 | 0.982702 | 39,595,718 | C | T | 1947 |
| rs11923194 | 9.85E−04 | −0.049903 | 0.167844 | 38,870,675 | C | G | 1948 |
| rs10095 | 9.90E−04 | 0.051559 | 0.843857 | 37,998,557 | A | G | 1949 |
| rs6599246 | 9.94E−04 | −0.055277 | 0.13417 | 38,722,814 | C | G | 1950 |
| rs2018725 | 1.00E−03 | 0.038001 | 0.52228 | 39,448,228 | C | T | 1951 |
| rs9851710 | 1.00E−03 | 0.040816 | 0.709099 | 38,694,905 | A | C | 1952 |
| chr3: 38831238 | 1.00E−03 | 0.160441 | 0.024271 | 38,831,238 | A | G | 1953 |
| chr3: 38397851 | 1.03E−03 | −0.110487 | 0.958191 | 38,397,851 | C | T | 1954 |
| rs6790627 | 1.03E−03 | −0.055148 | 0.134265 | 38,723,837 | C | T | 1955 |
| rs9867831 | 1.04E−03 | 0.080174 | 0.059466 | 38,903,647 | A | G | 1956 |
| rs7633988 | 1.06E−03 | 0.041128 | 0.709848 | 38,698,221 | A | T | 1957 |
| rs7427574 | 1.06E−03 | −0.051991 | 0.824358 | 38,659,839 | C | G | 1958 |
| rs28474903 | 1.08E−03 | 0.082423 | 0.058013 | 38,846,457 | A | C | 1959 |
| rs631312 | 1.08E−03 | −0.041485 | 0.730434 | 39,483,972 | A | G | 1960 |
| rs6782263 | 1.09E−03 | 0.08008 | 0.059525 | 38,877,394 | C | G | 1961 |
| rs34710261 | 1.10E−03 | 0.068168 | 0.102071 | 38,089,066 | A | G | 1962 |
| rs11711336 | 1.11E−03 | 0.051101 | 0.844873 | 38,001,588 | G | T | 1963 |
| chr3: 38840481 | 1.11E−03 | 0.083336 | 0.057375 | 38,840,481 | A | G | 1964 |
| chr3: 38709564 | 1.12E−03 | 0.202018 | 0.014021 | 38,709,564 | C | T | 1965 |
| chr3: 37889067 | 1.13E−03 | 0.045642 | 0.55487 | 37,889,067 | C | T | 1966 |
| rs73064283 | 1.14E−03 | 0.08069 | 0.055656 | 39,052,990 | A | G | 1967 |
| rs73064286 | 1.14E−03 | 0.080672 | 0.055669 | 39,056,231 | C | G | 1968 |
| rs73066261 | 1.15E−03 | 0.080669 | 0.055773 | 39,077,609 | C | T | 1969 |
| chr3: 39532775 | 1.15E−03 | −0.235598 | 0.012477 | 39,532,775 | A | G | 1970 |
| rs13079576 | 1.15E−03 | 0.039522 | 0.518699 | 39,457,665 | A | G | 1971 |
| chr3: 37988767 | 1.17E−03 | −0.062697 | 0.098106 | 37,988,767 | A | G | 1972 |
| rs11717282 | 1.18E−03 | 0.053624 | 0.860575 | 37,994,928 | A | C | 1973 |
| rs17037286 | 1.18E−03 | −0.050454 | 0.159989 | 38,001,391 | A | G | 1974 |
| rs73066579 | 1.18E−03 | 0.079429 | 0.059944 | 38,879,661 | A | C | 1975 |
| rs9814913 | 1.19E−03 | −0.080406 | 0.943773 | 39,131,965 | C | T | 1976 |
| rs17852414 | 1.19E−03 | 0.080374 | 0.056005 | 39,110,555 | A | G | 1977 |
| rs13321595 | 1.21E−03 | −0.080281 | 0.943816 | 39,143,813 | C | T | 1978 |
| rs35581078 | 1.21E−03 | −0.080268 | 0.943805 | 39,145,374 | C | T | 1979 |
| chr3: 37934175 | 1.23E−03 | −0.19111 | 0.98842 | 37,934,175 | A | G | 1980 |
| rs66497952 | 1.24E−03 | 0.079053 | 0.060179 | 38,897,356 | C | T | 1981 |
| rs7625935 | 1.25E−03 | 0.078966 | 0.060232 | 38,896,416 | G | T | 1982 |
| chr3: 38773054 | 1.26E−03 | −0.1599 | 0.983573 | 38,773,054 | A | T | 1983 |
| rs28394020 | 1.26E−03 | 0.078933 | 0.060251 | 38,895,855 | A | G | 1984 |
| rs67630000 | 1.26E−03 | 0.078935 | 0.06025 | 38,888,937 | A | G | 1985 |
| rs67434693 | 1.26E−03 | −0.078935 | 0.93975 | 38,888,973 | A | G | 1986 |
| rs28504547 | 1.26E−03 | 0.078932 | 0.060252 | 38,889,554 | C | T | 1987 |
| chr3: 38893548 | 1.26E−03 | 0.078926 | 0.060278 | 38,893,548 | C | T | 1988 |
| chr3: 38893579 | 1.27E−03 | 0.078906 | 0.060267 | 38,893,579 | C | T | 1989 |
| chr3: 38894186 | 1.27E−03 | 0.078902 | 0.06027 | 38,894,186 | C | T | 1990 |
| chr3: 38894217 | 1.27E−03 | 0.078902 | 0.06027 | 38,894,217 | C | T | 1991 |
| rs35036319 | 1.29E−03 | −0.045424 | 0.216467 | 38,702,330 | A | G | 1992 |
| rs11719578 | 1.30E−03 | 0.050642 | 0.845121 | 37,997,143 | A | G | 1993 |
| chr3: 37996119 | 1.31E−03 | 0.053166 | 0.861381 | 37,996,119 | C | T | 1994 |
| chr3: 37919948 | 1.31E−03 | −0.190898 | 0.988438 | 37,919,948 | G | T | 1995 |
| chr3: 39454605 | 1.33E−03 | −0.194323 | 0.017293 | 39,454,605 | C | T | 1996 |
| rs73066514 | 1.33E−03 | −0.09033 | 0.947972 | 38,838,976 | C | T | 1997 |
| rs13079441 | 1.37E−03 | −0.042217 | 0.752695 | 37,751,837 | A | T | 1998 |
| rs4130468 | 1.37E−03 | −0.063422 | 0.910364 | 38,837,152 | C | T | 1999 |
| chr3: 39395225 | 1.39E−03 | 0.449711 | 0.996465 | 39,395,225 | G | T | 2000 |
| rs73065157 | 1.41E−03 | −0.21264 | 0.983137 | 39,691,747 | C | T | 2001 |
| chr3: 37879099 | 1.42E−03 | 0.190345 | 0.011522 | 37,879,099 | A | C | 2002 |
| chr3: 38499596 | 1.43E−03 | 0.393939 | 0.992846 | 38,499,596 | A | C | 2003 |
| rs55795043 | 1.44E−03 | −0.080077 | 0.056902 | 39,176,646 | A | C | 2004 |
| rs4315640 | 1.51E−03 | −0.049839 | 0.1528 | 38,898,704 | A | G | 2005 |
| rs7373157 | 1.53E−03 | 0.052127 | 0.137318 | 38,606,427 | G | T | 2006 |
| rs62242295 | 1.54E−03 | 0.180101 | 0.013167 | 38,935,550 | A | T | 2007 |
| rs1805124 | 1.60E−03 | 0.039802 | 0.731346 | 38,620,424 | A | G | 2008 |
| chr3: 38640584 | 1.62E−03 | 0.070504 | 0.908864 | 38,640,584 | A | G | 2009 |
| rs7429946 | 1.64E−03 | 0.054386 | 0.878805 | 38,722,526 | A | G | 2010 |
| rs6599230 | 1.65E−03 | 0.050478 | 0.836514 | 38,649,716 | C | T | 2011 |
| rs11129776 | 1.67E−03 | 0.0487 | 0.836656 | 38,003,679 | A | C | 2012 |
| rs9816693 | 1.68E−03 | −0.04827 | 0.168549 | 38,022,958 | C | G | 2013 |
| rs73063271 | 1.69E−03 | −0.097018 | 0.960026 | 38,442,253 | A | G | 2014 |
| chr3: 38721046 | 1.70E−03 | −0.104784 | 0.949736 | 38,721,046 | G | T | 2015 |
| rs7374040 | 1.71E−03 | 0.051582 | 0.137082 | 38,607,051 | C | G | 2016 |
| rs11715513 | 1.77E−03 | −0.054174 | 0.121375 | 38,725,387 | A | G | 2017 |
| rs71329572 | 1.78E−03 | −0.052792 | 0.770347 | 39,457,592 | G | T | 2018 |
| rs13075057 | 1.78E−03 | −0.036389 | 0.375907 | 38,819,780 | C | G | 2019 |
| rs7627421 | 1.79E−03 | −0.036374 | 0.375893 | 38,821,038 | A | T | 2020 |
| rs7627881 | 1.79E−03 | 0.036371 | 0.62411 | 38,822,156 | A | G | 2021 |
| rs9859214 | 1.79E−03 | −0.03637 | 0.375889 | 38,822,965 | A | T | 2022 |
| rs9860830 | 1.79E−03 | −0.036363 | 0.375881 | 38,826,952 | A | G | 2023 |
| rs4608627 | 1.79E−03 | 0.036363 | 0.624121 | 38,827,665 | A | G | 2024 |
| rs7625973 | 1.79E−03 | 0.036363 | 0.624122 | 38,828,437 | C | T | 2025 |
| rs9871453 | 1.79E−03 | −0.036363 | 0.375877 | 38,828,966 | A | G | 2026 |
| rs4274690 | 1.79E−03 | 0.036363 | 0.624123 | 38,829,106 | A | C | 2027 |
| rs4368436 | 1.79E−03 | −0.036364 | 0.375864 | 38,830,536 | C | T | 2028 |
| rs41311123 | 1.81E−03 | −0.155736 | 0.981773 | 38,576,669 | C | T | 2029 |
| chr3: 38966602 | 1.81E−03 | 0.060443 | 0.888848 | 38,966,602 | G | T | 2030 |
| rs62244110 | 1.82E−03 | −0.036608 | 0.619781 | 38,807,434 | G | T | 2031 |
| rs4676478 | 1.83E−03 | 0.036369 | 0.624329 | 38,831,749 | C | T | 2032 |
| rs6794328 | 1.83E−03 | 0.036369 | 0.624359 | 38,832,741 | C | T | 2033 |
| chr3: 38893880 | 1.84E−03 | −0.048841 | 0.150865 | 38,893,880 | C | T | 2034 |
| rs62244111 | 1.85E−03 | −0.03618 | 0.615751 | 38,807,690 | C | G | 2035 |
| rs13073816 | 1.85E−03 | 0.048834 | 0.849144 | 38,890,350 | A | T | 2036 |
| rs13096744 | 1.85E−03 | −0.048834 | 0.150856 | 38,890,339 | G | T | 2037 |
| rs35479964 | 1.85E−03 | 0.048829 | 0.849148 | 38,887,930 | C | T | 2038 |
| rs9815891 | 1.86E−03 | −0.036158 | 0.615745 | 38,808,001 | C | T | 2039 |
| chr3: 39238699 | 1.90E−03 | −0.181253 | 0.011791 | 39,238,699 | A | G | 2040 |
| rs9827941 | 1.90E−03 | −0.036454 | 0.373409 | 38,811,463 | A | T | 2041 |
| rs6599261 | 1.92E−03 | 0.036046 | 0.384143 | 38,809,846 | A | T | 2042 |
| rs13087030 | 1.94E−03 | −0.048626 | 0.150221 | 38,849,395 | A | G | 2043 |
| rs62244112 | 1.95E−03 | −0.035986 | 0.615677 | 38,812,037 | A | G | 2044 |
| rs9828912 | 1.95E−03 | 0.035984 | 0.38433 | 38,812,013 | A | T | 2045 |
| rs11720953 | 1.95E−03 | 0.053184 | 0.123087 | 39,301,088 | A | G | 2046 |
| rs73056420 | 1.96E−03 | 0.053115 | 0.123038 | 39,305,266 | A | C | 2047 |
| rs73065296 | 1.96E−03 | 0.096224 | 0.039373 | 38,540,985 | A | G | 2048 |
| rs3792526 | 1.97E−03 | −0.053249 | 0.855581 | 38,380,553 | C | G | 2049 |
| rs62244113 | 1.97E−03 | 0.035947 | 0.384361 | 38,812,742 | A | G | 2050 |
| rs9861437 | 1.99E−03 | −0.053804 | 0.877012 | 39,298,996 | A | G | 2051 |
| rs11129778 | 2.01E−03 | 0.066417 | 0.091582 | 38,109,442 | A | G | 2052 |
| rs12636576 | 2.02E−03 | −0.035852 | 0.615591 | 38,814,845 | A | G | 2053 |
| rs35674337 | 2.04E−03 | −0.048355 | 0.150225 | 38,853,885 | A | G | 2054 |
| rs6792467 | 2.05E−03 | 0.034885 | 0.419524 | 37,752,372 | C | T | 2055 |
| chr3: 37984105 | 2.05E−03 | −0.191517 | 0.978632 | 37,984,105 | C | T | 2056 |
| rs4453791 | 2.07E−03 | −0.048274 | 0.150222 | 38,857,523 | C | T | 2057 |
| rs62244134 | 2.07E−03 | −0.048272 | 0.150222 | 38,863,768 | A | G | 2058 |
| rs13094414 | 2.10E−03 | 0.048211 | 0.849638 | 38,905,572 | A | G | 2059 |
| rs11927309 | 2.12E−03 | 0.048177 | 0.849347 | 38,910,119 | C | T | 2060 |
| rs7619862 | 2.16E−03 | −0.039897 | 0.749704 | 37,765,593 | C | T | 2061 |
| chr3: 38619086 | 2.17E−03 | −0.163913 | 0.984965 | 38,619,086 | A | G | 2062 |
| rs62242262 | 2.19E−03 | −0.048072 | 0.151414 | 38,912,387 | A | C | 2063 |
| rs1768208 | 2.20E−03 | −0.038369 | 0.726172 | 39,498,007 | C | T | 2064 |
| chr3: 38700978 | 2.20E−03 | 0.176205 | 0.984077 | 38,700,978 | A | G | 2065 |
| rs4129279 | 2.21E−03 | 0.036319 | 0.626311 | 38,835,402 | A | C | 2066 |
| rs545397 | 2.24E−03 | −0.038724 | 0.725658 | 39,505,087 | C | T | 2067 |
| rs11712745 | 2.24E−03 | −0.039368 | 0.741612 | 37,754,649 | A | G | 2068 |
| rs616147 | 2.25E−03 | 0.038693 | 0.274407 | 39,509,485 | A | G | 2069 |
| chr3: 39455437 | 2.25E−03 | −0.077817 | 0.088406 | 39,455,437 | A | G | 2070 |
| rs1513219 | 2.27E−03 | −0.038683 | 0.725788 | 39,508,763 | C | T | 2071 |
| rs62244116 | 2.29E−03 | −0.081778 | 0.927946 | 38,820,551 | A | C | 2072 |
| rs11714074 | 2.29E−03 | 0.038757 | 0.736918 | 38,618,789 | C | T | 2073 |
| rs62241188 | 2.30E−03 | −0.05353 | 0.841749 | 38,578,073 | C | G | 2074 |
| rs59478900 | 2.31E−03 | 0.035362 | 0.384637 | 38,828,607 | A | G | 2075 |
| rs1708104 | 2.31E−03 | −0.038836 | 0.727303 | 39,509,746 | C | T | 2076 |
| rs7633317 | 2.31E−03 | 0.040121 | 0.246488 | 37,759,734 | T | G | 2077 |
| chr3: 39318395 | 2.31E−03 | 0.430757 | 0.996421 | 39,318,395 | C | T | 2078 |
| chr3: 37921729 | 2.32E−03 | 0.085237 | 0.944357 | 37,921,729 | C | T | 2079 |
| rs62244117 | 2.33E−03 | 0.035333 | 0.384486 | 38,827,497 | C | T | 2080 |
| chr3: 39115125 | 2.34E−03 | −0.140608 | 0.015723 | 39,115,125 | C | G | 2081 |
| rs1768190 | 2.34E−03 | −0.038224 | 0.725152 | 39,484,444 | C | T | 2082 |
| rs73058955 | 2.37E−03 | −0.08338 | 0.943334 | 37,961,430 | A | G | 2083 |
| chr3: 39086849 | 2.44E−03 | 0.139859 | 0.984128 | 39,086,849 | A | G | 2084 |
| rs2070492 | 2.44E−03 | 0.062006 | 0.100007 | 38,332,821 | T | C | 2085 |
| rs28810495 | 2.45E−03 | −0.038149 | 0.713853 | 39,485,659 | A | G | 2086 |
| chr3: 39022372 | 2.45E−03 | 0.102631 | 0.957007 | 39,022,372 | G | T | 2087 |
| chr3: 38343423 | 2.45E−03 | −0.184009 | 0.023826 | 38,343,423 | C | G | 2088 |
| chr3: 38901737 | 2.46E−03 | 0.208153 | 0.012008 | 38,901,737 | A | C | 2089 |
| rs62244119 | 2.47E−03 | 0.035467 | 0.385001 | 38,834,862 | A | C | 2090 |
| rs62242769 | 2.47E−03 | −0.038466 | 0.262457 | 38,619,266 | A | G | 2091 |
| rs62244120 | 2.49E−03 | −0.046285 | 0.160544 | 38,844,664 | C | G | 2092 |
| chr3: 38362018 | 2.51E−03 | −0.199713 | 0.987857 | 38,362,018 | G | T | 2093 |
| chr3: 37920290 | 2.52E−03 | 0.084852 | 0.945929 | 37,920,290 | A | G | 2094 |
| rs7428946 | 2.56E−03 | 0.065085 | 0.090761 | 38,058,767 | A | C | 2095 |
| chr3: 39021800 | 2.56E−03 | −0.111568 | 0.969653 | 39,021,800 | A | G | 2096 |
| rs73064265 | 2.57E−03 | −0.111518 | 0.969636 | 39,039,515 | C | T | 2097 |
| rs13097780 | 2.62E−03 | 0.046121 | 0.832343 | 38,658,025 | C | G | 2098 |
| chr3: 37965721 | 2.63E−03 | −0.161289 | 0.982585 | 37,965,721 | A | G | 2099 |
| rs17036845 | 2.63E−03 | 0.038754 | 0.262841 | 37,750,978 | A | C | 2100 |
| rs58228096 | 2.64E−03 | −0.038756 | 0.736175 | 37,749,308 | C | T | 2101 |
| chr3: 38628106 | 2.64E−03 | −0.163068 | 0.984458 | 38,628,106 | C | T | 2102 |
| chr3: 37910131 | 2.68E−03 | −0.084417 | 0.053575 | 37,910,131 | A | G | 2103 |
| rs2269350 | 2.73E−03 | −0.037674 | 0.294392 | 39,428,164 | A | G | 2104 |
| chr3: 38599504 | 2.73E−03 | 0.126959 | 0.965283 | 38,599,504 | C | T | 2105 |
| rs73825705 | 2.75E−03 | −0.068963 | 0.090062 | 38,634,252 | C | G | 2106 |
| rs73056401 | 2.76E−03 | −0.083354 | 0.952887 | 39,220,187 | A | T | 2107 |
| chr3: 38771537 | 2.76E−03 | 0.114105 | 0.028608 | 38,771,537 | A | G | 2108 |
| rs1118148 | 2.77E−03 | 0.038366 | 0.259901 | 37,753,485 | C | G | 2109 |
| rs2276866 | 2.77E−03 | −0.038362 | 0.740103 | 37,753,619 | A | T | 2110 |
| rs7433495 | 2.77E−03 | −0.055077 | 0.764993 | 39,555,967 | C | T | 2111 |
| rs11709059 | 2.78E−03 | 0.038357 | 0.259886 | 37,754,482 | G | T | 2112 |
| chr3: 38811822 | 2.78E−03 | 0.050979 | 0.801556 | 38,811,822 | G | T | 2113 |
| rs1402755 | 2.79E−03 | −0.038344 | 0.740137 | 37,756,282 | C | T | 2114 |
| rs6550504 | 2.82E−03 | −0.038395 | 0.735212 | 37,748,433 | C | T | 2115 |
| rs7613157 | 2.82E−03 | 0.038387 | 0.264901 | 37,748,375 | A | G | 2116 |
| chr3: 39519772 | 2.82E−03 | 0.210249 | 0.983785 | 39,519,772 | A | C | 2117 |
| rs3922580 | 2.84E−03 | 0.035799 | 0.625476 | 38,836,298 | C | T | 2118 |
| chr3: 38843435 | 2.92E−03 | 0.04713 | 0.853292 | 38,843,435 | C | T | 2119 |
| rs11919746 | 2.95E−03 | 0.04707 | 0.853193 | 38,846,900 | C | T | 2120 |
| rs9832895 | 2.97E−03 | 0.038315 | 0.563513 | 38,636,537 | C | T | 2121 |
| rs62244136 | 2.97E−03 | −0.114564 | 0.02482 | 38,865,438 | A | G | 2122 |
| rs784518 | 3.03E−03 | −0.037652 | 0.390642 | 39,161,042 | C | G | 2123 |
| chr3: 39000837 | 3.04E−03 | −0.134769 | 0.977692 | 39,000,837 | A | G | 2124 |
| chr3: 38182011 | 3.15E−03 | 0.066098 | 0.128366 | 38,182,011 | G | T | 2125 |
| rs13081054 | 3.17E−03 | −0.033817 | 0.486658 | 39,447,451 | A | G | 2126 |
| rs9857730 | 3.21E−03 | −0.043252 | 0.184284 | 38,026,945 | C | T | 2127 |
| rs4676613 | 3.26E−03 | −0.036393 | 0.285834 | 39,223,257 | C | G | 2128 |
| chr3: 38900648 | 3.28E−03 | 0.138139 | 0.022044 | 38,900,648 | C | T | 2129 |
| rs73056438 | 3.50E−03 | −0.059495 | 0.897729 | 38,646,478 | C | T | 2130 |
| rs196378 | 3.54E−03 | −0.035404 | 0.434786 | 38,392,349 | C | G | 2131 |
| chr3: 39281780 | 3.58E−03 | −0.231714 | 0.014006 | 39,281,780 | G | T | 2132 |
| chr3: 38758236 | 3.61E−03 | 0.16503 | 0.988793 | 38,758,236 | C | T | 2133 |
| rs169045 | 3.61E−03 | −0.035229 | 0.434819 | 38,394,586 | C | T | 2134 |
| chr3: 38437231 | 3.63E−03 | 0.149554 | 0.961836 | 38,437,231 | G | T | 2135 |
| chr3: 38548964 | 3.67E−03 | 0.146293 | 0.016497 | 38,548,964 | A | G | 2136 |
| rs13067055 | 3.69E−03 | 0.036067 | 0.306577 | 39,485,521 | A | G | 2137 |
| rs41315507 | 3.72E−03 | −0.08254 | 0.943966 | 38,572,871 | C | T | 2138 |
| chr3: 37944167 | 3.72E−03 | 0.076193 | 0.086811 | 37,944,167 | A | G | 2139 |
| chr3: 38318752 | 3.72E−03 | −0.04387 | 0.218405 | 38,318,752 | C | T | 2140 |
| rs34743428 | 3.76E−03 | −0.037067 | 0.650863 | 39,573,199 | A | T | 2141 |
| rs9819612 | 3.76E−03 | −0.034749 | 0.397194 | 38,834,980 | C | T | 2142 |
| rs73052961 | 3.78E−03 | −0.039215 | 0.774582 | 37,759,524 | A | G | 2143 |
| chr3: 39636115 | 3.82E−03 | 0.290626 | 0.990461 | 39,636,115 | A | G | 2144 |
| chr3: 38133126 | 3.82E−03 | 0.148964 | 0.012969 | 38,133,126 | A | G | 2145 |
| rs2284815 | 3.85E−03 | −0.050116 | 0.856069 | 38,389,678 | C | T | 2146 |
| rs6789468 | 3.86E−03 | 0.04686 | 0.851191 | 37,988,497 | A | G | 2147 |
| chr3: 39111314 | 3.90E−03 | 0.133923 | 0.021458 | 39,111,314 | A | T | 2148 |
| rs41312061 | 3.97E−03 | 0.137025 | 0.021433 | 38,659,631 | A | G | 2149 |
| chr3: 38408873 | 4.05E−03 | −0.146861 | 0.984239 | 38,408,873 | A | G | 2150 |
| rs9311172 | 4.05E−03 | 0.041383 | 0.81087 | 38,019,147 | C | G | 2151 |
| rs928807 | 4.09E−03 | −0.041278 | 0.188851 | 38,017,186 | G | T | 2152 |
| rs6769106 | 4.12E−03 | −0.041329 | 0.189053 | 38,019,973 | A | G | 2153 |
| rs6793254 | 4.14E−03 | 0.041316 | 0.810968 | 38,019,955 | A | G | 2154 |
| rs9843506 | 4.14E−03 | 0.04135 | 0.810854 | 38,021,027 | A | C | 2155 |
| rs9311173 | 4.14E−03 | −0.041334 | 0.189121 | 38,020,532 | A | G | 2156 |
| chr3: 38589666 | 4.14E−03 | −0.12489 | 0.03397 | 38,589,666 | A | G | 2157 |
| rs2070486 | 4.15E−03 | −0.049703 | 0.85603 | 38,389,795 | A | C | 2158 |
| rs9311176 | 4.16E−03 | 0.041384 | 0.810701 | 38,022,611 | A | C | 2159 |
| chr3: 39370781 | 4.19E−03 | −0.100309 | 0.968605 | 39,370,781 | A | G | 2160 |
| rs9876660 | 4.21E−03 | −0.049043 | 0.159312 | 38,639,719 | C | G | 2161 |
| chr3: 38844937 | 4.24E−03 | 0.109741 | 0.955277 | 38,844,937 | A | C | 2162 |
| chr3: 38017656 | 4.27E−03 | −0.175301 | 0.989781 | 38,017,656 | C | T | 2163 |
| rs2154776 | 4.34E−03 | −0.160913 | 0.984849 | 38,039,739 | A | C | 2164 |
| rs9311193 | 4.34E−03 | −0.034523 | 0.318703 | 38,609,663 | C | T | 2165 |
| rs2070487 | 4.36E−03 | 0.049528 | 0.142806 | 38,393,009 | A | G | 2166 |
| rs1573291 | 4.40E−03 | 0.04736 | 0.8652 | 37,984,753 | C | T | 2167 |
| chr3: 38431678 | 4.43E−03 | −0.338244 | 0.006759 | 38,431,678 | C | T | 2168 |
| rs9829569 | 4.50E−03 | 0.040937 | 0.811398 | 38,013,333 | A | G | 2169 |
| rs6776469 | 4.51E−03 | 0.049381 | 0.1469 | 38,394,012 | A | G | 2170 |
| rs28707243 | 4.53E−03 | −0.047467 | 0.68822 | 38,428,495 | C | T | 2171 |
| rs879444 | 4.58E−03 | 0.032363 | 0.505084 | 39,454,482 | C | T | 2172 |
| rs56990533 | 4.66E−03 | −0.08019 | 0.947176 | 38,569,611 | A | G | 2173 |
| rs1392283 | 4.67E−03 | 0.092036 | 0.040608 | 38,229,592 | C | T | 2174 |
| rs9823482 | 4.67E−03 | 0.04079 | 0.811498 | 38,011,811 | A | G | 2175 |
| rs41312437 | 4.69E−03 | 0.144416 | 0.014943 | 38,624,950 | A | G | 2176 |
| rs45505695 | 4.73E−03 | 0.080416 | 0.052743 | 38,573,403 | A | G | 2177 |
| rs73062884 | 4.75E−03 | 0.091895 | 0.040568 | 38,310,396 | A | G | 2178 |
| chr3: 39513170 | 4.76E−03 | −0.139775 | 0.022624 | 39,513,170 | C | T | 2179 |
| chr3: 38591624 | 4.77E−03 | 0.121504 | 0.966176 | 38,591,624 | G | T | 2180 |
| rs13096483 | 4.78E−03 | −0.03278 | 0.499713 | 39,449,429 | C | T | 2181 |
| rs169046 | 4.81E−03 | −0.034419 | 0.431862 | 38,392,371 | C | T | 2182 |
| rs73067159 | 4.82E−03 | −0.168738 | 0.982403 | 38,575,765 | C | T | 2183 |
| rs56157245 | 4.82E−03 | 0.048824 | 0.145961 | 38,395,386 | A | G | 2184 |
| rs73825594 | 4.83E−03 | 0.082195 | 0.052949 | 38,577,610 | A | G | 2185 |
| chr3: 38575105 | 4.83E−03 | 0.080374 | 0.052822 | 38,575,105 | A | G | 2186 |
| rs55707921 | 4.87E−03 | 0.048781 | 0.145685 | 38,395,400 | C | T | 2187 |
| chr3: 39309763 | 4.89E−03 | 0.314051 | 0.007787 | 39,309,763 | A | G | 2188 |
| rs34897882 | 4.89E−03 | 0.032072 | 0.504258 | 39,473,313 | C | T | 2189 |
| chr3: 38602671 | 4.93E−03 | −0.051406 | 0.235149 | 38,602,671 | C | G | 2190 |
| chr3: 38440647 | 4.99E−03 | 0.07772 | 0.924059 | 38,440,647 | A | G | 2191 |
| rs938183 | 5.10E−03 | −0.032782 | 0.504068 | 39,455,298 | A | G | 2192 |
| rs9872804 | 5.10E−03 | 0.040443 | 0.811712 | 38,008,466 | C | T | 2193 |
| rs56055643 | 5.11E−03 | −0.032248 | 0.481018 | 39,447,633 | A | G | 2194 |
| rs11719907 | 5.12E−03 | 0.046785 | 0.866258 | 37,984,704 | C | T | 2195 |
| rs13321209 | 5.13E−03 | −0.037265 | 0.764965 | 37,755,813 | A | G | 2196 |
| rs6786403 | 5.14E−03 | −0.086758 | 0.966861 | 38,198,086 | C | T | 2197 |
| rs7614714 | 5.14E−03 | −0.07094 | 0.93386 | 38,057,067 | C | T | 2198 |
| rs7625114 | 5.15E−03 | −0.086757 | 0.96687 | 38,189,717 | A | G | 2199 |
| chr3: 38494146 | 5.15E−03 | −0.236321 | 0.009346 | 38,494,146 | A | T | 2200 |
| chr3: 38804546 | 5.18E−03 | −0.104491 | 0.968816 | 38,804,546 | C | T | 2201 |
| rs71325510 | 5.24E−03 | 0.058795 | 0.869163 | 39,191,136 | A | G | 2202 |
| rs73056224 | 5.26E−03 | −0.043439 | 0.83993 | 39,338,624 | A | G | 2203 |
| chr3: 38152639 | 5.28E−03 | 0.086626 | 0.033054 | 38,152,639 | C | T | 2204 |
| rs3935183 | 5.29E−03 | −0.04227 | 0.831579 | 38,613,188 | A | G | 2205 |
| chr3: 39416948 | 5.30E−03 | −0.047145 | 0.702948 | 39,416,948 | C | T | 2206 |
| chr3: 39258463 | 5.30E−03 | 0.169154 | 0.015153 | 39,258,463 | A | C | 2207 |
| rs674243 | 5.31E−03 | −0.031932 | 0.496809 | 39,453,699 | C | T | 2208 |
| rs73054549 | 5.35E−03 | −0.042762 | 0.843494 | 38,631,999 | A | G | 2209 |
| rs11926412 | 5.36E−03 | 0.043314 | 0.1602 | 39,338,419 | C | T | 2210 |
| rs41312945 | 5.39E−03 | 0.042697 | 0.156833 | 38,631,849 | A | G | 2211 |
| rs62241769 | 5.39E−03 | 0.04769 | 0.18831 | 38,509,300 | C | T | 2212 |
| chr3: 38140553 | 5.39E−03 | −0.08647 | 0.966963 | 38,140,553 | A | G | 2213 |
| chr3: 38139868 | 5.40E−03 | 0.086459 | 0.033036 | 38,139,868 | C | T | 2214 |
| chr3: 38138454 | 5.42E−03 | −0.086438 | 0.966965 | 38,138,454 | C | T | 2215 |
| rs6773586 | 5.46E−03 | −0.042919 | 0.839158 | 39,326,461 | A | T | 2216 |
| chr3: 38680126 | 5.51E−03 | −0.118124 | 0.970366 | 38,680,126 | C | T | 2217 |
| rs4996738 | 5.56E−03 | −0.034949 | 0.304396 | 39,313,684 | G | T | 2218 |
| chr3: 39609933 | 5.56E−03 | 0.232073 | 0.98404 | 39,609,933 | G | T | 2219 |
| chr3: 39475164 | 5.58E−03 | −0.03148 | 0.499144 | 39,475,164 | C | T | 2220 |
| rs7651347 | 5.60E−03 | −0.042825 | 0.839876 | 39,315,054 | C | T | 2221 |
| rs73054554 | 5.66E−03 | −0.043339 | 0.845257 | 38,633,061 | A | T | 2222 |
| rs7644531 | 5.75E−03 | −0.039931 | 0.187983 | 38,005,937 | A | T | 2223 |
| rs9840828 | 5.79E−03 | 0.036732 | 0.234197 | 37,757,392 | G | T | 2224 |
| rs7632911 | 5.79E−03 | −0.039903 | 0.187967 | 38,005,903 | A | G | 2225 |
| chr3: 39340976 | 5.79E−03 | −0.22115 | 0.006301 | 39,340,976 | A | G | 2226 |
| rs11709075 | 5.82E−03 | −0.031301 | 0.499948 | 39,475,249 | A | G | 2227 |
| rs11709044 | 5.85E−03 | −0.031276 | 0.49996 | 39,475,204 | A | G | 2228 |
| chr3: 39423329 | 5.89E−03 | 0.498081 | 0.005121 | 39,423,329 | A | G | 2229 |
| rs12495623 | 5.89E−03 | −0.031424 | 0.496543 | 39,454,885 | G | T | 2230 |
| rs1009966 | 5.91E−03 | 0.031382 | 0.50367 | 39,448,595 | A | G | 2231 |
| rs11705761 | 5.91E−03 | −0.090316 | 0.963069 | 39,195,669 | C | T | 2232 |
| rs11129833 | 5.92E−03 | 0.031372 | 0.50373 | 39,451,385 | G | T | 2233 |
| rs11715770 | 5.96E−03 | −0.039777 | 0.187898 | 38,005,751 | A | G | 2234 |
| chr3: 39555969 | 5.96E−03 | −0.071786 | 0.894631 | 39,555,969 | C | T | 2235 |
| rs6773329 | 5.99E−03 | −0.038897 | 0.777762 | 38,689,480 | A | G | 2236 |
| rs73056206 | 6.01E−03 | 0.042395 | 0.160343 | 39,329,947 | A | G | 2237 |
| chr3: 38118773 | 6.01E−03 | 0.1428 | 0.013435 | 38,118,773 | G | T | 2238 |
| chr3: 39377371 | 6.05E−03 | 0.083243 | 0.037428 | 39,377,371 | A | G | 2239 |
| chr3: 38807868 | 6.05E−03 | −0.128737 | 0.980023 | 38,807,868 | C | G | 2240 |
| chr3: 39471903 | 6.07E−03 | 0.604999 | 0.004236 | 39,471,903 | A | G | 2241 |
| chr3: 39717722 | 6.08E−03 | −0.061197 | 0.109357 | 39,717,722 | C | G | 2242 |
| rs11129834 | 6.28E−03 | 0.03109 | 0.505621 | 39,463,350 | A | G | 2243 |
| rs12638676 | 6.35E−03 | 0.031291 | 0.487182 | 39,477,729 | A | G | 2244 |
| rs12495185 | 6.42E−03 | −0.031021 | 0.49789 | 39,447,794 | A | G | 2245 |
| rs9875443 | 6.43E−03 | −0.044538 | 0.840189 | 38,657,275 | A | T | 2246 |
| rs6770798 | 6.43E−03 | 0.030972 | 0.505437 | 39,464,883 | C | T | 2247 |
| rs6770797 | 6.44E−03 | −0.030971 | 0.494563 | 39,464,881 | A | C | 2248 |
| rs73064834 | 6.44E−03 | −0.077286 | 0.957144 | 38,333,860 | A | G | 2249 |
| rs2965067 | 6.53E−03 | 0.032689 | 0.329949 | 39,478,041 | A | G | 2250 |
| rs34629457 | 6.53E−03 | 0.030913 | 0.503328 | 39,466,571 | C | T | 2251 |
| rs13073538 | 6.54E−03 | 0.031271 | 0.512415 | 39,449,416 | A | G | 2252 |
| rs7638977 | 6.56E−03 | 0.030947 | 0.501917 | 39,448,105 | A | T | 2253 |
| rs1768209 | 6.66E−03 | 0.032582 | 0.330272 | 39,477,679 | C | G | 2254 |
| rs1707981 | 6.70E−03 | −0.032547 | 0.669638 | 39,477,510 | G | T | 2255 |
| rs11705945 | 6.74E−03 | 0.030829 | 0.502618 | 39,459,727 | A | G | 2256 |
| rs1392191 | 6.77E−03 | 0.101013 | 0.02616 | 39,391,157 | C | T | 2257 |
| chr3: 39387840 | 6.80E−03 | 0.100778 | 0.026052 | 39,387,840 | A | G | 2258 |
| rs2669845 | 6.81E−03 | −0.049088 | 0.885043 | 39,296,222 | C | T | 2259 |
| rs7374138 | 6.83E−03 | 0.051192 | 0.787241 | 38,580,736 | C | G | 2260 |
| rs2853704 | 6.84E−03 | 0.061662 | 0.926029 | 39,318,526 | C | T | 2261 |
| rs73060545 | 6.85E−03 | 0.049067 | 0.115018 | 39,295,602 | A | G | 2262 |
| rs2669843 | 6.85E−03 | −0.049068 | 0.884993 | 39,295,059 | A | G | 2263 |
| rs35310432 | 6.86E−03 | 0.030729 | 0.500997 | 39,449,962 | A | G | 2264 |
| chr3: 39389382 | 6.89E−03 | 0.100689 | 0.025983 | 39,389,382 | C | T | 2265 |
| chr3: 39388918 | 6.89E−03 | 0.100661 | 0.025971 | 39,388,918 | A | G | 2266 |
| chr3: 39384832 | 6.92E−03 | 0.100387 | 0.025908 | 39,384,832 | C | T | 2267 |
| rs34029841 | 6.92E−03 | −0.030698 | 0.497597 | 39,460,244 | C | G | 2268 |
| chr3: 39376174 | 6.94E−03 | 0.099931 | 0.02568 | 39,376,174 | A | G | 2269 |
| chr3: 39385505 | 6.94E−03 | 0.100375 | 0.025839 | 39,385,505 | C | T | 2270 |
| chr3: 39382184 | 6.95E−03 | 0.100187 | 0.025767 | 39,382,184 | C | T | 2271 |
| chr3: 39366736 | 6.95E−03 | 0.099744 | 0.025613 | 39,366,736 | A | G | 2272 |
| chr3: 39370532 | 6.95E−03 | 0.099806 | 0.025633 | 39,370,532 | A | G | 2273 |
| rs61732061 | 6.95E−03 | −0.099903 | 0.974336 | 39,376,069 | C | T | 2274 |
| chr3: 39365368 | 6.95E−03 | 0.099791 | 0.025568 | 39,365,368 | C | T | 2275 |
| chr3: 39373640 | 6.95E−03 | −0.09985 | 0.974354 | 39,373,640 | A | G | 2276 |
| chr3: 39366585 | 6.96E−03 | 0.099716 | 0.025598 | 39,366,585 | A | G | 2277 |
| chr3: 39366645 | 6.96E−03 | −0.099717 | 0.974402 | 39,366,645 | G | T | 2278 |
| chr3: 39366935 | 6.96E−03 | 0.099722 | 0.025599 | 39,366,935 | A | G | 2279 |
| rs7638752 | 6.96E−03 | 0.099763 | 0.025612 | 39,369,502 | C | G | 2280 |
| chr3: 39374205 | 6.96E−03 | −0.09984 | 0.974362 | 39,374,205 | C | T | 2281 |
| chr3: 39370419 | 6.97E−03 | 0.552067 | 0.002067 | 39,370,419 | A | G | 2282 |
| chr3: 39379661 | 6.97E−03 | 0.09997 | 0.02568 | 39,379,661 | C | T | 2283 |
| chr3: 39369972 | 6.98E−03 | 0.275896 | 0.004056 | 39,369,972 | A | G | 2284 |
| chr3: 39386312 | 6.99E−03 | 0.100332 | 0.025807 | 39,386,312 | A | G | 2285 |
| rs11129832 | 7.03E−03 | 0.030614 | 0.500396 | 39,447,529 | C | T | 2286 |
| rs2649749 | 7.03E−03 | 0.073029 | 0.951535 | 39,335,769 | A | T | 2287 |
| rs13059755 | 7.08E−03 | 0.030649 | 0.502918 | 39,459,515 | C | T | 2288 |
| rs36230797 | 7.15E−03 | 0.049122 | 0.114034 | 39,296,809 | C | T | 2289 |
| rs73062575 | 7.17E−03 | −0.10497 | 0.972279 | 38,741,764 | G | T | 2290 |
| rs2268750 | 7.30E−03 | −0.052614 | 0.910474 | 38,334,012 | G | T | 2291 |
| rs73064832 | 7.30E−03 | −0.052606 | 0.910494 | 38,333,800 | C | T | 2292 |
| rs12494100 | 7.31E−03 | −0.030448 | 0.499465 | 39,456,839 | A | G | 2293 |
| chr3: 38814087 | 7.38E−03 | −0.126012 | 0.968637 | 38,814,087 | A | G | 2294 |
| chr3: 38757371 | 7.40E−03 | 0.145848 | 0.013757 | 38,757,371 | A | G | 2295 |
| rs7640507 | 7.49E−03 | −0.04103 | 0.834847 | 39,324,614 | G | T | 2296 |
| chr3: 39386485 | 7.53E−03 | 0.100579 | 0.025535 | 39,386,485 | C | T | 2297 |
| chr3: 39383294 | 7.59E−03 | −0.275035 | 0.995359 | 39,383,294 | C | G | 2298 |
| chr3: 39360064 | 7.63E−03 | 0.09849 | 0.02571 | 39,360,064 | C | T | 2299 |
| chr3: 38658246 | 7.68E−03 | −0.059804 | 0.910479 | 38,658,246 | A | T | 2300 |
| rs4525803 | 7.68E−03 | 0.030199 | 0.501433 | 39,465,626 | G | T | 2301 |
| rs4676635 | 7.68E−03 | −0.098399 | 0.974281 | 39,359,820 | C | T | 2302 |
| chr3: 39573571 | 7.78E−03 | −0.607708 | 0.995555 | 39,573,571 | C | G | 2303 |
| rs36020975 | 7.79E−03 | −0.030123 | 0.499579 | 39,466,484 | A | G | 2304 |
| rs3914283 | 7.86E−03 | −0.030077 | 0.499603 | 39,466,288 | C | T | 2305 |
| chr3: 39261921 | 7.97E−03 | 0.093014 | 0.966877 | 39,261,921 | C | T | 2306 |
| chr3: 38352328 | 7.97E−03 | 0.042649 | 0.454071 | 38,352,328 | C | T | 2307 |
| rs73062845 | 8.02E−03 | −0.089827 | 0.961469 | 38,127,648 | A | G | 2308 |
| chr3: 39358213 | 8.05E−03 | −0.09779 | 0.974217 | 39,358,213 | C | T | 2309 |
| chr3: 38193667 | 8.15E−03 | 0.162806 | 0.011144 | 38,193,667 | C | G | 2310 |
| chr3: 39332286 | 8.15E−03 | 0.26837 | 0.003908 | 39,332,286 | A | G | 2311 |
| rs41312391 | 8.17E−03 | −0.045874 | 0.849766 | 38,573,610 | C | T | 2312 |
| chr3: 37857503 | 8.17E−03 | −0.20634 | 0.992799 | 37,857,503 | A | T | 2313 |
| chr3: 39357132 | 8.21E−03 | −0.098393 | 0.974454 | 39,357,132 | C | T | 2314 |
| chr3: 39357237 | 8.24E−03 | 0.097482 | 0.025888 | 39,357,237 | A | G | 2315 |
| rs73067106 | 8.24E−03 | −0.068304 | 0.925715 | 38,544,995 | G | T | 2316 |
| chr3: 38095026 | 8.33E−03 | −0.13734 | 0.987328 | 38,095,026 | C | T | 2317 |
| chr3: 39275596 | 8.47E−03 | 0.136636 | 0.013414 | 39,275,596 | A | C | 2318 |
| rs816510 | 8.47E−03 | −0.031342 | 0.663427 | 39,447,299 | G | T | 2319 |
| chr3: 37925422 | 8.73E−03 | 0.205016 | 0.007728 | 37,925,422 | A | G | 2320 |
| chr3: 39393491 | 8.79E−03 | 0.132059 | 0.018693 | 39,393,491 | A | G | 2321 |
| rs674192 | 8.80E−03 | 0.031084 | 0.333852 | 39,475,148 | A | G | 2322 |
| rs6599222 | 8.92E−03 | 0.040946 | 0.160447 | 38,623,066 | C | T | 2323 |
| rs55812368 | 8.96E−03 | −0.042091 | 0.829218 | 38,661,898 | C | G | 2324 |
| rs172111 | 8.97E−03 | −0.05969 | 0.929001 | 38,162,998 | C | T | 2325 |
| rs41315501 | 8.98E−03 | 0.087552 | 0.044081 | 38,572,062 | A | G | 2326 |
| chr3: 39404899 | 9.01E−03 | −0.129526 | 0.022635 | 39,404,899 | C | G | 2327 |
| chr3: 38496100 | 9.01E−03 | 0.079995 | 0.93265 | 38,496,100 | C | T | 2328 |
| chr3: 38098852 | 9.05E−03 | 0.088359 | 0.03965 | 38,098,852 | A | G | 2329 |
| chr3: 39280692 | 9.06E−03 | 0.145539 | 0.978436 | 39,280,692 | C | T | 2330 |
| rs2133578 | 9.16E−03 | −0.031613 | 0.341493 | 39,421,155 | C | T | 2331 |
| chr3: 39600305 | 9.23E−03 | 0.610006 | 0.005005 | 39,600,305 | C | T | 2332 |
| rs151618 | 9.27E−03 | −0.032599 | 0.493218 | 38,399,189 | T | C | 2333 |
| rs166631 | 9.32E−03 | 0.059314 | 0.071065 | 38,195,472 | A | G | 2334 |
| rs156261 | 9.33E−03 | 0.059271 | 0.07097 | 38,190,440 | A | G | 2335 |
| chr3: 39309140 | 9.33E−03 | 0.263445 | 0.003839 | 39,309,140 | C | T | 2336 |
| chr3: 38802401 | 9.35E−03 | 0.142818 | 0.013209 | 38,802,401 | A | T | 2337 |
| rs73056454 | 9.36E−03 | −0.041099 | 0.8348 | 38,656,360 | C | T | 2338 |
| chr3: 38872314 | 9.43E−03 | −0.056764 | 0.114219 | 38,872,314 | C | T | 2339 |
| rs17756489 | 9.55E−03 | 0.029719 | 0.440908 | 39,519,947 | C | T | 2340 |
| rs272576 | 9.65E−03 | −0.058899 | 0.929157 | 38,233,183 | C | T | 2341 |
| chr3: 39691686 | 9.76E−03 | −0.043787 | 0.650087 | 39,691,686 | A | C | 2342 |
| rs9871799 | 9.85E−03 | −0.030632 | 0.663931 | 39,459,324 | A | G | 2343 |
| chr3: 38559849 | 9.95E−03 | 0.084372 | 0.940349 | 38,559,849 | A | G | 2344 |
| rs528364 | 9.98E−03 | 0.030567 | 0.336385 | 39,461,253 | A | G | 2345 |

TABLE 19
Association results for QRS interval in a 2
Mb region flanking rs6795970 on chromosome 3.

| | | | | | effect | other | SEQ ID |
|---|---|---|---|---|---|---|---|
| marker | p-value | effect | freq | position | allele | allele | NO: |
| rs6781009 | 2.32E−08 | 0.07282 | 0.236685 | 38,560,438 | C | T | 2346 |
| rs6762565 | 2.33E−08 | −0.074246 | 0.771542 | 38,557,195 | C | T | 2347 |
| rs10865879 | 2.39E−08 | −0.074258 | 0.771705 | 38,552,366 | A | C | 2348 |
| rs55880069 | 2.77E−08 | 0.074014 | 0.227407 | 38,558,045 | C | T | 2349 |
| rs55872442 | 3.50E−08 | 0.073641 | 0.226204 | 38,556,439 | A | G | 2350 |
| rs1473805 | 4.57E−08 | −0.07314 | 0.775038 | 38,552,683 | A | G | 2351 |
| rs9880327 | 4.78E−08 | −0.068249 | 0.265034 | 38,657,897 | A | G | 2352 |
| rs11710498 | 4.90E−08 | 0.072963 | 0.233457 | 38,551,669 | C | T | 2353 |
| rs9856387 | 5.20E−08 | 0.06822 | 0.735989 | 38,662,230 | C | T | 2354 |
| rs41315485 | 5.54E−08 | −0.073575 | 0.767815 | 38,565,279 | A | G | 2355 |
| rs35231307 | 6.10E−08 | −0.072141 | 0.776282 | 38,564,412 | C | T | 2356 |
| rs1473804 | 6.46E−08 | −0.072321 | 0.776438 | 38,551,394 | C | T | 2357 |
| rs11129795 | 6.56E−08 | 0.071955 | 0.223435 | 38,564,167 | A | G | 2358 |
| rs12497866 | 6.60E−08 | −0.072279 | 0.776514 | 38,550,869 | C | T | 2359 |
| rs62239356 | 6.63E−08 | 0.072007 | 0.223882 | 38,562,097 | C | T | 2360 |
| rs56283404 | 6.77E−08 | 0.071957 | 0.223353 | 38,561,710 | A | C | 2361 |
| rs12490047 | 6.80E−08 | −0.071957 | 0.776656 | 38,561,419 | C | G | 2362 |
| rs6771881 | 7.21E−08 | −0.072001 | 0.776836 | 38,553,268 | A | G | 2363 |
| chr3: 38643196 | 1.38E−07 | −0.078518 | 0.202742 | 38,643,196 | A | G | 2364 |
| rs6599233 | 1.63E−07 | 0.06473 | 0.721856 | 38,687,884 | C | T | 2365 |
| rs13091192 | 2.23E−07 | 0.057884 | 0.427403 | 38,709,756 | A | G | 2366 |
| chr3: 38357854 | 2.41E−07 | −0.134945 | 0.132454 | 38,357,854 | A | T | 2367 |
| rs6599240 | 2.52E−07 | 0.056796 | 0.435855 | 38,713,721 | A | G | 1 |
| rs11129800 | 2.59E−07 | −0.056854 | 0.563857 | 38,719,374 | C | T | 2 |
| rs7375123 | 3.40E−07 | −0.077633 | 0.1914 | 38,645,102 | A | G | 2368 |
| rs6782237 | 4.57E−07 | 0.062228 | 0.720125 | 38,671,557 | C | G | 2369 |
| rs4131768 | 4.65E−07 | 0.062186 | 0.720193 | 38,670,178 | A | G | 2370 |
| rs6599232 | 5.01E−07 | −0.062159 | 0.280398 | 38,674,764 | C | T | 2371 |
| rs9851724 | 5.50E−07 | 0.062781 | 0.718205 | 38,694,939 | T | C | 2372 |
| rs7624535 | 8.88E−07 | −0.075192 | 0.185688 | 38,640,206 | G | T | 2373 |
| rs11129801 | 9.71E−07 | −0.05894 | 0.295848 | 38,725,379 | A | G | 3 |
| rs9832895 | 1.11E−06 | 0.061256 | 0.563513 | 38,636,537 | C | T | 2374 |
| rs12631535 | 1.46E−06 | 0.066438 | 0.78803 | 38,706,121 | T | C | 2375 |
| rs6599234 | 1.91E−06 | −0.057585 | 0.29089 | 38,690,304 | A | T | 2376 |
| rs62243862 | 2.02E−06 | −0.065433 | 0.201294 | 38,716,553 | C | T | 2377 |
| rs6599210 | 2.57E−06 | 0.073235 | 0.140932 | 38,533,214 | A | G | 2378 |
| rs9860525 | 2.63E−06 | 0.073236 | 0.141056 | 38,547,009 | A | T | 2379 |
| rs7430391 | 2.77E−06 | −0.057354 | 0.290387 | 38,698,971 | A | G | 2380 |
| rs7633988 | 2.96E−06 | 0.057118 | 0.709848 | 38,698,221 | A | T | 2381 |
| rs62242859 | 3.04E−06 | 0.064437 | 0.800065 | 38,712,327 | C | T | 2382 |
| rs6779704 | 3.08E−06 | −0.072606 | 0.857669 | 38,515,268 | A | T | 2383 |
| rs7430191 | 3.15E−06 | 0.069543 | 0.823635 | 38,629,028 | C | T | 2384 |
| rs9851710 | 3.21E−06 | 0.056223 | 0.709099 | 38,694,905 | A | C | 2385 |
| rs12639182 | 3.55E−06 | 0.06402 | 0.800504 | 38,711,234 | C | T | 2386 |
| rs6599230 | 4.35E−06 | 0.07161 | 0.836514 | 38,649,716 | C | T | 2387 |
| rs13097780 | 4.46E−06 | 0.068364 | 0.832343 | 38,658,025 | C | G | 2388 |
| rs3796387 | 4.98E−06 | 0.068856 | 0.171953 | 38,554,211 | A | G | 2389 |
| rs6783110 | 5.00E−06 | 0.052424 | 0.359181 | 38,727,939 | A | G | 2390 |
| rs11924846 | 5.02E−06 | 0.052378 | 0.359263 | 38,731,570 | C | T | 5 |
| rs11710077 | 5.19E−06 | 0.069266 | 0.824592 | 38,632,903 | A | T | 2391 |
| rs4076737 | 5.80E−06 | 0.051848 | 0.359175 | 38,739,786 | G | T | 10 |
| rs6795970 | 6.45E−06 | 0.051815 | 0.36095 | 38,741,679 | A | G | 13 |
| rs6773331 | 7.45E−06 | −0.185657 | 0.02334 | 38,659,401 | A | T | 2392 |
| rs7373492 | 7.89E−06 | 0.185316 | 0.976569 | 38,662,373 | C | T | 2393 |
| rs6810361 | 8.12E−06 | 0.069814 | 0.164832 | 38,549,972 | C | T | 2394 |
| rs7638275 | 8.74E−06 | −0.18721 | 0.022746 | 38,640,827 | A | G | 2395 |
| chr3: 38512241 | 8.93E−06 | 0.129077 | 0.046847 | 38,512,241 | A | G | 2396 |
| rs12490478 | 1.20E−05 | −0.053893 | 0.346668 | 38,792,703 | G | T | 2397 |
| rs35036319 | 1.52E−05 | −0.059548 | 0.216467 | 38,702,330 | A | G | 2398 |
| rs7373065 | 1.56E−05 | 0.178357 | 0.975596 | 38,685,319 | C | T | 2399 |
| rs9878604 | 2.38E−05 | 0.051985 | 0.669519 | 38,801,665 | C | T | 2400 |
| rs11926158 | 2.48E−05 | −0.052169 | 0.333793 | 38,798,319 | C | G | 2401 |
| rs7433306 | 2.50E−05 | 0.048195 | 0.362944 | 38,745,643 | C | G | 15 |
| rs6804918 | 2.58E−05 | −0.052851 | 0.714411 | 38,573,960 | A | G | 2402 |
| rs6800541 | 2.60E−05 | 0.047776 | 0.363841 | 38,749,836 | C | T | 18 |
| rs9990137 | 2.76E−05 | 0.048209 | 0.652707 | 38,734,469 | A | G | 6 |
| rs7645178 | 2.82E−05 | −0.052193 | 0.712714 | 38,572,562 | A | G | 2403 |
| rs6805187 | 2.82E−05 | −0.048153 | 0.347023 | 38,735,510 | A | C | 7 |
| rs9820042 | 2.85E−05 | 0.047577 | 0.363935 | 38,754,120 | C | T | 2404 |
| rs9844378 | 2.91E−05 | −0.05401 | 0.262317 | 38,675,875 | A | G | 2405 |
| rs12053903 | 3.04E−05 | 0.05118 | 0.278414 | 38,568,397 | C | T | 2406 |
| rs7373779 | 3.09E−05 | 0.051192 | 0.278326 | 38,568,947 | C | T | 2407 |
| rs6599250 | 3.18E−05 | −0.047314 | 0.635957 | 38,759,033 | C | T | 20 |
| rs9843500 | 3.33E−05 | 0.04971 | 0.303238 | 38,563,099 | C | G | 2408 |
| rs4073796 | 3.33E−05 | 0.049502 | 0.304242 | 38,565,853 | A | G | 2409 |
| rs4073797 | 3.34E−05 | −0.049502 | 0.695758 | 38,565,854 | A | T | 2410 |
| rs9844577 | 3.37E−05 | −0.04722 | 0.637157 | 38,763,732 | A | C | 2411 |
| rs6793245 | 3.49E−05 | 0.052018 | 0.276953 | 38,574,041 | A | G | 2412 |
| rs7429945 | 3.50E−05 | 0.048921 | 0.310687 | 38,566,693 | C | T | 2413 |
| rs6599254 | 3.61E−05 | 0.047051 | 0.36327 | 38,770,559 | A | G | 23 |
| rs1805126 | 3.61E−05 | −0.048802 | 0.689248 | 38,567,410 | A | G | 2414 |
| rs6771157 | 5.11E−05 | −0.051959 | 0.241736 | 38,738,867 | C | G | 9 |
| rs12632942 | 5.11E−05 | 0.051913 | 0.758469 | 38,740,002 | A | G | 11 |
| rs61487238 | 5.13E−05 | 0.051941 | 0.758316 | 38,739,075 | C | T | 2415 |
| rs62242434 | 5.15E−05 | 0.052048 | 0.757732 | 38,734,533 | C | T | 2416 |
| rs62242435 | 5.29E−05 | −0.051952 | 0.242103 | 38,734,621 | A | G | 2417 |
| rs62242430 | 5.30E−05 | −0.051976 | 0.242208 | 38,729,180 | C | T | 2418 |
| rs61014925 | 5.31E−05 | 0.051976 | 0.757898 | 38,730,904 | A | G | 2419 |
| rs6781740 | 5.32E−05 | 0.051965 | 0.757796 | 38,728,981 | C | T | 2420 |
| rs11710006 | 5.33E−05 | 0.051972 | 0.757762 | 38,727,794 | A | T | 4 |
| rs7428779 | 6.04E−05 | −0.056462 | 0.189218 | 38,621,427 | T | C | 2421 |
| rs41312433 | 6.44E−05 | 0.056236 | 0.810742 | 38,622,646 | G | T | 2422 |
| rs9818148 | 6.49E−05 | −0.055328 | 0.275009 | 38,643,260 | G | T | 2423 |
| rs58454174 | 7.38E−05 | 0.055582 | 0.803661 | 38,590,537 | C | T | 2424 |
| rs11711602 | 7.39E−05 | 0.055258 | 0.809355 | 38,622,051 | C | T | 2425 |
| rs6801957 | 7.65E−05 | −0.045001 | 0.635242 | 38,742,319 | C | T | 14 |
| rs9833775 | 7.82E−05 | 0.054825 | 0.805395 | 38,616,088 | C | T | 2426 |
| rs10212202 | 8.28E−05 | −0.054695 | 0.194835 | 38,613,394 | C | G | 2427 |
| rs11721012 | 8.60E−05 | −0.054582 | 0.194968 | 38,610,878 | A | G | 2428 |
| rs9311194 | 8.70E−05 | −0.054544 | 0.195007 | 38,610,076 | A | G | 2429 |
| rs7355944 | 8.73E−05 | −0.05483 | 0.194552 | 38,601,197 | A | G | 2430 |
| rs9311192 | 8.77E−05 | 0.054518 | 0.804968 | 38,609,615 | C | T | 2431 |
| rs9311191 | 9.23E−05 | −0.054336 | 0.195189 | 38,608,114 | C | T | 2432 |
| rs10154914 | 9.36E−05 | −0.05431 | 0.195228 | 38,607,634 | A | T | 2433 |
| rs12636153 | 9.41E−05 | 0.050819 | 0.760858 | 38,744,301 | A | C | 2434 |
| rs55981643 | 9.62E−05 | −0.054255 | 0.195307 | 38,606,959 | A | G | 2435 |
| rs11711941 | 1.03E−04 | −0.044279 | 0.607063 | 38,753,544 | C | T | 2436 |
| rs6790396 | 1.07E−04 | 0.044083 | 0.369591 | 38,746,929 | C | G | 17 |
| rs10428132 | 1.18E−04 | −0.043583 | 0.629702 | 38,752,558 | G | T | 2437 |
| rs62242438 | 1.19E−04 | −0.049359 | 0.242986 | 38,741,352 | C | T | 2438 |
| rs6599220 | 1.20E−04 | 0.168846 | 0.981567 | 38,612,998 | C | T | 2439 |
| rs62245110 | 1.22E−04 | −0.053542 | 0.195859 | 38,605,315 | A | C | 2440 |
| chr3: 38397851 | 1.25E−04 | −0.126088 | 0.958191 | 38,397,851 | C | T | 2441 |
| chr3: 38519917 | 1.31E−04 | 0.152069 | 0.02794 | 38,519,917 | A | C | 2442 |
| rs7433723 | 1.32E−04 | −0.043369 | 0.630913 | 38,759,961 | A | G | 2443 |
| rs6599257 | 1.32E−04 | −0.048773 | 0.724409 | 38,779,592 | T | C | 33 |
| rs6599255 | 1.40E−04 | 0.043248 | 0.3701 | 38,771,419 | A | C | 24 |
| rs62241188 | 1.41E−04 | −0.065165 | 0.841749 | 38,578,073 | C | G | 2444 |
| rs6768664 | 1.42E−04 | 0.043023 | 0.521816 | 38,659,470 | A | C | 2445 |
| rs4414778 | 1.50E−04 | −0.047113 | 0.269836 | 38,787,169 | C | T | 36 |
| rs7430451 | 1.59E−04 | 0.043488 | 0.660228 | 38,770,499 | C | G | 22 |
| chr3: 38717393 | 1.66E−04 | 0.084214 | 0.091492 | 38,717,393 | A | G | 2446 |
| rs62244105 | 1.67E−04 | 0.048029 | 0.741276 | 38,789,587 | A | G | 2447 |
| rs3922843 | 1.68E−04 | −0.048988 | 0.251481 | 38,599,347 | A | G | 2448 |
| rs11129807 | 1.75E−04 | −0.047784 | 0.253152 | 38,782,421 | A | T | 2449 |
| chr3: 38782569 | 1.75E−04 | 0.047793 | 0.746893 | 38,782,569 | A | G | 2450 |
| chr3: 38780863 | 1.76E−04 | −0.047752 | 0.253144 | 38,780,863 | A | G | 2451 |
| rs62244077 | 1.76E−04 | 0.047756 | 0.746846 | 38,781,392 | A | G | 2452 |
| rs12635859 | 1.77E−04 | 0.047777 | 0.746804 | 38,783,890 | A | G | 2453 |
| rs12635869 | 1.77E−04 | 0.047778 | 0.746802 | 38,783,971 | A | G | 2454 |
| rs62244078 | 1.77E−04 | −0.047787 | 0.253202 | 38,784,646 | C | T | 2455 |
| rs62244075 | 1.78E−04 | −0.047627 | 0.25241 | 38,778,938 | C | G | 2456 |
| rs62244074 | 1.78E−04 | −0.047614 | 0.252353 | 38,778,904 | A | G | 2457 |
| rs62244080 | 1.78E−04 | −0.047795 | 0.253282 | 38,786,821 | A | G | 2458 |
| rs7432804 | 1.80E−04 | 0.04624 | 0.732109 | 38,778,513 | A | G | 30 |
| rs62244079 | 1.80E−04 | −0.047786 | 0.253159 | 38,786,782 | C | T | 2459 |
| rs62244081 | 1.82E−04 | −0.047856 | 0.253389 | 38,788,013 | C | T | 2460 |
| rs7651106 | 1.82E−04 | −0.045647 | 0.720684 | 38,779,345 | C | T | 32 |
| rs62244103 | 1.85E−04 | −0.047929 | 0.253575 | 38,788,933 | C | G | 2461 |
| rs62244104 | 1.86E−04 | 0.046301 | 0.343389 | 38,789,222 | A | C | 2462 |
| rs13098827 | 1.91E−04 | 0.044125 | 0.365009 | 38,735,947 | A | G | 2463 |
| rs12497173 | 1.92E−04 | 0.045472 | 0.279043 | 38,780,394 | G | T | 2464 |
| rs7610489 | 1.93E−04 | 0.045474 | 0.27906 | 38,781,482 | A | G | 34 |
| rs59669930 | 1.94E−04 | 0.045474 | 0.27906 | 38,781,515 | C | T | 2465 |
| rs7641844 | 1.96E−04 | 0.046709 | 0.736415 | 38,777,255 | A | G | 29 |
| rs4417808 | 2.00E−04 | 0.045475 | 0.279116 | 38,785,241 | A | G | 2466 |
| rs56040630 | 2.00E−04 | −0.045473 | 0.720867 | 38,785,529 | C | T | 2467 |
| rs7430477 | 2.09E−04 | 0.040587 | 0.52152 | 38,740,494 | C | T | 12 |
| rs10212338 | 2.12E−04 | 0.045451 | 0.279278 | 38,787,654 | A | G | 37 |
| rs6599256 | 2.18E−04 | 0.046811 | 0.739804 | 38,776,229 | G | T | 28 |
| rs6798015 | 2.28E−04 | 0.043863 | 0.323672 | 38,773,840 | C | T | 26 |
| rs6763876 | 2.35E−04 | −0.046762 | 0.258382 | 38,775,751 | C | T | 27 |
| rs11720166 | 2.36E−04 | −0.049316 | 0.739489 | 38,574,816 | C | G | 2468 |
| rs6599251 | 2.40E−04 | 0.041407 | 0.383888 | 38,760,813 | G | T | 21 |
| chr3: 38640584 | 2.52E−04 | 0.079704 | 0.908864 | 38,640,584 | A | G | 2469 |
| chr3: 38716846 | 2.57E−04 | 0.115032 | 0.959158 | 38,716,846 | C | T | 2470 |
| rs6799868 | 2.60E−04 | 0.048028 | 0.258119 | 38,576,560 | C | T | 2471 |
| chr3: 38762560 | 2.63E−04 | 0.053246 | 0.659245 | 38,762,560 | A | G | 2472 |
| rs2169552 | 2.63E−04 | 0.09501 | 0.051399 | 38,412,972 | A | G | 2473 |
| rs7374165 | 2.73E−04 | 0.042926 | 0.690326 | 38,701,689 | A | C | 2474 |
| rs6777775 | 2.83E−04 | −0.041731 | 0.581722 | 38,796,125 | A | G | 2475 |
| chr3: 38640691 | 3.16E−04 | −0.0806 | 0.908585 | 38,640,691 | C | T | 2476 |
| rs59858965 | 3.19E−04 | 0.047182 | 0.76677 | 38,742,965 | A | C | 2477 |
| rs59468016 | 3.28E−04 | −0.047116 | 0.233104 | 38,743,251 | A | G | 2478 |
| rs7615140 | 3.30E−04 | −0.041491 | 0.333662 | 38,757,030 | C | T | 19 |
| rs57326399 | 3.30E−04 | −0.047102 | 0.233081 | 38,743,304 | C | T | 2479 |
| rs12638572 | 3.67E−04 | 0.041105 | 0.664935 | 38,762,801 | A | G | 2480 |
| rs13061927 | 3.87E−04 | −0.038967 | 0.595643 | 38,682,356 | G | T | 2481 |
| chr3: 38658246 | 4.00E−04 | −0.077337 | 0.910479 | 38,658,246 | A | T | 2482 |
| rs6784303 | 4.16E−04 | 0.040703 | 0.665051 | 38,769,919 | C | T | 2483 |
| rs6599253 | 4.16E−04 | 0.040695 | 0.665049 | 38,769,364 | A | C | 2484 |
| rs4420805 | 4.21E−04 | −0.044695 | 0.720896 | 38,789,237 | A | C | 2485 |
| rs62244070 | 4.23E−04 | 0.046221 | 0.764885 | 38,773,175 | C | T | 2486 |
| rs12630795 | 4.52E−04 | 0.045979 | 0.765737 | 38,771,989 | A | G | 25 |
| chr3: 38422797 | 4.68E−04 | 0.089849 | 0.053363 | 38,422,797 | C | T | 2487 |
| rs7431305 | 4.68E−04 | 0.046335 | 0.726542 | 38,639,168 | G | T | 2488 |
| rs6599231 | 4.75E−04 | 0.039262 | 0.51977 | 38,659,745 | C | T | 2489 |
| rs34786326 | 4.77E−04 | 0.045914 | 0.770275 | 38,744,872 | C | T | 2490 |
| rs6809970 | 5.20E−04 | 0.093474 | 0.04791 | 38,416,547 | A | C | 2491 |
| rs9875610 | 5.36E−04 | 0.040836 | 0.398496 | 38,805,121 | A | G | 2492 |
| rs41312391 | 5.36E−04 | −0.05853 | 0.849766 | 38,573,610 | C | T | 2493 |
| rs7611456 | 5.59E−04 | 0.043151 | 0.280545 | 38,788,469 | C | T | 2494 |
| rs7372839 | 5.61E−04 | −0.037769 | 0.464923 | 38,660,651 | A | C | 2495 |
| rs9861852 | 5.85E−04 | −0.092919 | 0.952565 | 38,425,837 | C | T | 2496 |
| rs7645704 | 6.04E−04 | −0.091577 | 0.947447 | 38,472,085 | A | C | 2497 |
| rs62242444 | 6.08E−04 | 0.044772 | 0.770208 | 38,752,237 | C | T | 2498 |
| rs6806209 | 6.23E−04 | 0.092588 | 0.047183 | 38,432,787 | C | T | 2499 |
| rs62242448 | 6.28E−04 | −0.044649 | 0.229753 | 38,755,623 | A | C | 2500 |
| rs60554541 | 6.40E−04 | 0.04458 | 0.770269 | 38,757,476 | A | G | 2501 |
| rs9879824 | 6.61E−04 | −0.092344 | 0.953072 | 38,439,692 | C | T | 2502 |
| rs60969309 | 6.77E−04 | −0.044368 | 0.229666 | 38,763,008 | C | T | 2503 |
| rs7617919 | 6.78E−04 | −0.044371 | 0.229628 | 38,768,993 | A | G | 2504 |
| rs6599252 | 6.80E−04 | −0.044354 | 0.229653 | 38,764,695 | A | T | 2505 |
| rs12634001 | 6.80E−04 | −0.044349 | 0.229659 | 38,763,702 | A | G | 2506 |
| rs7651170 | 6.95E−04 | −0.092032 | 0.953262 | 38,449,113 | A | G | 2507 |
| rs62241189 | 6.97E−04 | −0.06653 | 0.155663 | 38,581,750 | A | G | 2508 |
| chr3: 38450284 | 7.02E−04 | 0.09193 | 0.04673 | 38,450,284 | A | G | 2509 |
| rs6785849 | 7.22E−04 | 0.091768 | 0.046644 | 38,461,700 | G | T | 2510 |
| chr3: 38764954 | 7.24E−04 | −0.107947 | 0.044322 | 38,764,954 | A | G | 2511 |
| chr3: 38467860 | 7.35E−04 | −0.091661 | 0.953431 | 38,467,860 | A | G | 2512 |
| rs9871059 | 7.35E−04 | −0.091661 | 0.953431 | 38,467,870 | C | T | 2513 |
| rs9809948 | 7.51E−04 | −0.091527 | 0.953524 | 38,475,651 | C | G | 2514 |
| rs9812912 | 7.58E−04 | 0.065786 | 0.845333 | 38,582,233 | C | T | 2515 |
| rs57475654 | 7.59E−04 | −0.091466 | 0.953561 | 38,479,392 | A | G | 2516 |
| chr3: 38601173 | 7.87E−04 | −0.082412 | 0.079393 | 38,601,173 | A | G | 2517 |
| rs6772948 | 7.92E−04 | −0.049851 | 0.831966 | 38,590,320 | C | T | 2518 |
| rs9311197 | 7.93E−04 | 0.03688 | 0.459247 | 38,751,607 | A | G | 2519 |
| rs11711260 | 7.98E−04 | −0.061599 | 0.902742 | 38,546,293 | C | T | 2520 |
| rs13062680 | 7.99E−04 | −0.03732 | 0.593383 | 38,699,853 | C | T | 2521 |
| rs11717146 | 8.00E−04 | 0.061511 | 0.097231 | 38,531,806 | A | G | 2522 |
| rs41313243 | 8.19E−04 | −0.07126 | 0.902648 | 38,651,584 | A | T | 2523 |
| rs7373102 | 8.23E−04 | 0.03751 | 0.532002 | 38,655,632 | C | T | 2524 |
| rs12491987 | 8.32E−04 | 0.064962 | 0.867744 | 38,624,048 | C | T | 2525 |
| chr3: 38406049 | 8.39E−04 | −0.091666 | 0.938918 | 38,406,049 | C | T | 2526 |
| rs9809798 | 8.42E−04 | 0.036669 | 0.459673 | 38,748,809 | A | C | 2527 |
| rs7428167 | 8.98E−04 | −0.036472 | 0.540286 | 38,753,195 | C | T | 2528 |
| rs62244110 | 9.04E−04 | −0.037903 | 0.619781 | 38,807,434 | G | T | 2529 |
| chr3: 38583447 | 9.09E−04 | −0.155733 | 0.967401 | 38,583,447 | C | T | 2530 |
| rs73060568 | 1.00E−03 | 0.219707 | 0.012049 | 39,646,839 | A | G | 2531 |
| chr3: 39404899 | 1.01E−03 | −0.158546 | 0.022635 | 39,404,899 | C | G | 2532 |
| chr3: 38343423 | 1.02E−03 | −0.194951 | 0.023826 | 38,343,423 | C | G | 2533 |
| rs3934936 | 1.03E−03 | −0.039986 | 0.649493 | 38,639,313 | C | T | 2534 |
| rs73065166 | 1.05E−03 | 0.220018 | 0.012078 | 39,698,404 | C | T | 2535 |
| rs62244111 | 1.08E−03 | −0.036958 | 0.615751 | 38,807,690 | C | G | 2536 |
| rs9815891 | 1.08E−03 | −0.03695 | 0.615745 | 38,808,001 | C | T | 2537 |
| rs12489820 | 1.09E−03 | −0.059904 | 0.90126 | 38,455,975 | C | T | 2538 |
| rs62244112 | 1.10E−03 | −0.036862 | 0.615677 | 38,812,037 | A | G | 2539 |
| rs9828912 | 1.11E−03 | 0.03686 | 0.38433 | 38,812,013 | A | T | 2540 |
| rs62244113 | 1.11E−03 | 0.036844 | 0.384361 | 38,812,742 | A | G | 2541 |
| chr3: 38766563 | 1.12E−03 | −0.34684 | 0.988562 | 38,766,563 | C | T | 2542 |
| rs6599261 | 1.12E−03 | 0.036838 | 0.384143 | 38,809,846 | A | T | 2543 |
| rs12636576 | 1.12E−03 | −0.036797 | 0.615591 | 38,814,845 | A | G | 2544 |
| rs4622847 | 1.20E−03 | −0.040749 | 0.291505 | 38,799,347 | A | G | 2545 |
| rs59478900 | 1.20E−03 | 0.036547 | 0.384637 | 38,828,607 | A | G | 2546 |
| rs62244119 | 1.21E−03 | 0.036901 | 0.385001 | 38,834,862 | A | C | 2547 |
| rs62244117 | 1.24E−03 | 0.036475 | 0.384486 | 38,827,497 | C | T | 2548 |
| rs28619020 | 1.24E−03 | −0.088074 | 0.955272 | 38,496,005 | C | T | 2549 |
| rs6797133 | 1.29E−03 | −0.037255 | 0.371291 | 38,631,037 | A | G | 2550 |
| chr3: 38109696 | 1.30E−03 | 0.12399 | 0.979851 | 38,109,696 | C | T | 2551 |
| rs73070981 | 1.33E−03 | 0.05551 | 0.121417 | 38,606,842 | C | T | 2552 |
| rs11717818 | 1.33E−03 | −0.035258 | 0.511907 | 38,697,700 | C | T | 2553 |
| rs11708996 | 1.40E−03 | 0.05528 | 0.12072 | 38,608,927 | C | G | 2554 |
| rs9836531 | 1.40E−03 | 0.062814 | 0.893756 | 38,804,578 | A | G | 2555 |
| chr3: 38400812 | 1.45E−03 | −0.079238 | 0.935556 | 38,400,812 | C | T | 2556 |
| rs9874436 | 1.47E−03 | 0.034842 | 0.474006 | 38,750,328 | C | G | 2557 |
| rs6771945 | 1.47E−03 | 0.079011 | 0.064664 | 38,397,911 | A | G | 2558 |
| chr3: 38400750 | 1.52E−03 | 0.078704 | 0.064467 | 38,400,750 | A | G | 2559 |
| rs73056438 | 1.52E−03 | −0.0631 | 0.897729 | 38,646,478 | C | T | 2560 |
| rs9841329 | 1.54E−03 | 0.034855 | 0.435636 | 38,662,807 | A | G | 2561 |
| rs6771940 | 1.55E−03 | 0.078624 | 0.064515 | 38,397,901 | A | G | 2562 |
| rs17037638 | 1.57E−03 | −0.078499 | 0.935612 | 38,400,455 | C | T | 2563 |
| rs7620883 | 1.59E−03 | 0.041757 | 0.221489 | 38,589,484 | A | G | 2564 |
| chr3: 38397728 | 1.62E−03 | −0.078355 | 0.935547 | 38,397,728 | A | G | 2565 |
| rs59856101 | 1.80E−03 | 0.041184 | 0.246351 | 38,794,198 | A | C | 2566 |
| chr3: 38225480 | 1.81E−03 | 0.082682 | 0.068067 | 38,225,480 | C | T | 2567 |
| rs73064540 | 1.89E−03 | 0.041118 | 0.246011 | 38,796,286 | A | T | 2568 |
| chr3: 38712931 | 1.97E−03 | −0.296998 | 0.010394 | 38,712,931 | A | G | 2569 |
| rs55787218 | 2.11E−03 | −0.092149 | 0.958282 | 38,558,267 | C | T | 2570 |
| chr3: 37936400 | 2.19E−03 | −0.125399 | 0.972834 | 37,936,400 | C | G | 2571 |
| chr3: 38638409 | 2.23E−03 | −0.067678 | 0.89742 | 38,638,409 | C | G | 2572 |
| chr3: 39059475 | 2.26E−03 | 0.046083 | 0.302671 | 39,059,475 | A | G | 2573 |
| rs7638910 | 2.40E−03 | −0.03323 | 0.495296 | 38,695,720 | A | C | 2574 |
| chr3: 38801183 | 2.41E−03 | −0.040607 | 0.753603 | 38,801,183 | A | G | 2575 |
| rs169044 | 2.42E−03 | −0.036569 | 0.566791 | 38,394,919 | C | T | 2576 |
| rs13096318 | 2.47E−03 | 0.046941 | 0.770644 | 39,400,761 | C | T | 2577 |
| chr3: 38640731 | 2.54E−03 | 0.042332 | 0.355996 | 38,640,731 | C | T | 2578 |
| chr3: 38639721 | 2.64E−03 | −0.040919 | 0.744223 | 38,639,721 | A | G | 2579 |
| chr3: 37880557 | 2.71E−03 | −0.180411 | 0.989494 | 37,880,557 | C | T | 2580 |
| chr3: 39650476 | 2.76E−03 | −0.302381 | 0.994699 | 39,650,476 | A | C | 2581 |
| rs9844644 | 2.85E−03 | 0.039528 | 0.764047 | 38,814,797 | C | T | 2582 |
| rs9861242 | 2.87E−03 | 0.039945 | 0.218534 | 38,584,338 | A | G | 2583 |
| rs11705730 | 3.02E−03 | 0.037363 | 0.61091 | 38,789,238 | A | C | 2584 |
| chr3: 38598253 | 3.20E−03 | 0.180695 | 0.977627 | 38,598,253 | C | T | 2585 |
| rs7374891 | 3.39E−03 | 0.035921 | 0.562929 | 38,643,509 | A | T | 2586 |
| rs6777141 | 3.41E−03 | −0.107703 | 0.02983 | 38,075,320 | A | G | 2587 |
| rs6795580 | 3.43E−03 | −0.035875 | 0.437472 | 38,642,577 | C | G | 2588 |
| rs7638909 | 3.49E−03 | 0.038794 | 0.251338 | 38,569,977 | G | T | 2589 |
| rs1805124 | 3.54E−03 | −0.036125 | 0.276397 | 38,620,424 | C | T | 2590 |
| rs73058909 | 3.64E−03 | −0.070689 | 0.055706 | 37,923,577 | C | T | 2591 |
| chr3: 38642089 | 3.64E−03 | −0.336874 | 0.004018 | 38,642,089 | A | G | 2592 |
| rs73058914 | 3.66E−03 | −0.070567 | 0.055785 | 37,924,492 | A | G | 2593 |
| rs6801131 | 3.69E−03 | 0.19963 | 0.009584 | 39,371,560 | G | T | 2594 |
| chr3: 38062226 | 3.72E−03 | 0.386993 | 0.99311 | 38,062,226 | C | T | 2595 |
| rs9861030 | 3.84E−03 | −0.093246 | 0.028889 | 38,032,610 | C | T | 2596 |
| chr3: 38574711 | 3.99E−03 | −0.087102 | 0.957374 | 38,574,711 | C | T | 2597 |
| rs7374540 | 4.01E−03 | −0.032484 | 0.625127 | 38,609,146 | A | C | 2598 |
| rs4016647 | 4.04E−03 | 0.190626 | 0.009351 | 39,369,355 | G | T | 2599 |
| rs56808891 | 4.05E−03 | 0.076627 | 0.064269 | 38,641,225 | A | G | 2600 |
| rs7430439 | 4.07E−03 | −0.032744 | 0.624811 | 38,778,643 | A | G | 31 |
| rs13083907 | 4.07E−03 | −0.188706 | 0.991285 | 37,765,116 | C | T | 2601 |
| rs4016648 | 4.09E−03 | −0.191103 | 0.990631 | 39,369,596 | A | T | 2602 |
| chr3: 38753590 | 4.13E−03 | −0.152112 | 0.984001 | 38,753,590 | C | T | 2603 |
| rs7633974 | 4.14E−03 | −0.03997 | 0.315135 | 38,640,927 | C | G | 2604 |
| chr3: 39387876 | 4.15E−03 | −0.259866 | 0.987019 | 39,387,876 | C | T | 2605 |
| chr3: 39566928 | 4.19E−03 | −0.213987 | 0.989968 | 39,566,928 | C | T | 2606 |
| rs73070977 | 4.19E−03 | 0.050071 | 0.111239 | 38,606,435 | G | T | 2607 |
| rs1909555 | 4.23E−03 | 0.19623 | 0.009339 | 39,357,200 | A | G | 2608 |
| rs41312411 | 4.29E−03 | −0.050144 | 0.888794 | 38,596,241 | C | G | 2609 |
| rs2649755 | 4.34E−03 | −0.198807 | 0.990663 | 39,351,973 | C | T | 2610 |
| rs4016649 | 4.36E−03 | 0.201489 | 0.009326 | 39,369,954 | A | G | 2611 |
| rs41312045 | 4.64E−03 | 0.130436 | 0.024856 | 38,645,025 | C | G | 2612 |
| rs11927181 | 4.70E−03 | 0.103949 | 0.977238 | 38,043,540 | G | T | 2613 |
| chr3: 38721547 | 4.79E−03 | −0.150905 | 0.984657 | 38,721,547 | C | T | 2614 |
| chr3: 38575105 | 4.91E−03 | 0.078055 | 0.052822 | 38,575,105 | A | G | 2615 |
| rs73825594 | 4.91E−03 | 0.079814 | 0.052949 | 38,577,610 | A | G | 2616 |
| rs56990533 | 4.91E−03 | −0.077544 | 0.947176 | 38,569,611 | A | G | 2617 |
| rs45505695 | 4.93E−03 | 0.077853 | 0.052743 | 38,573,403 | A | G | 2618 |
| chr3: 39385846 | 4.94E−03 | 0.158017 | 0.012201 | 39,385,846 | C | T | 2619 |
| rs169046 | 4.95E−03 | −0.033474 | 0.431862 | 38,392,371 | C | T | 2620 |
| chr3: 38598527 | 4.95E−03 | −0.186028 | 0.009649 | 38,598,527 | C | G | 2621 |
| rs73064557 | 4.96E−03 | 0.050584 | 0.861009 | 38,804,641 | C | T | 2622 |
| chr3: 38048625 | 5.02E−03 | 0.398091 | 0.993517 | 38,048,625 | G | T | 2623 |
| rs9818242 | 5.06E−03 | −0.046084 | 0.139186 | 37,957,695 | A | G | 2624 |
| rs169045 | 5.09E−03 | −0.033083 | 0.434819 | 38,394,586 | C | T | 2625 |
| chr3: 38678925 | 5.12E−03 | 0.146795 | 0.018207 | 38,678,925 | A | G | 2626 |
| rs10212167 | 5.14E−03 | −0.04336 | 0.149071 | 37,954,063 | C | T | 2627 |
| rs9311193 | 5.16E−03 | −0.033036 | 0.318703 | 38,609,663 | C | T | 2628 |
| rs7627207 | 5.17E−03 | −0.04335 | 0.14903 | 37,954,562 | A | T | 2629 |
| rs6806563 | 5.18E−03 | −0.217751 | 0.990708 | 39,375,945 | C | T | 2630 |
| rs196378 | 5.21E−03 | −0.033087 | 0.434786 | 38,392,349 | C | G | 2631 |
| chr3: 38348396 | 5.21E−03 | 0.064191 | 0.146456 | 38,348,396 | A | G | 2632 |
| rs3749386 | 5.22E−03 | 0.035148 | 0.367493 | 38,471,069 | C | T | 2633 |
| rs4131778 | 5.38E−03 | −0.034034 | 0.721166 | 38,587,230 | A | T | 2634 |
| rs41315507 | 5.64E−03 | −0.076618 | 0.943966 | 38,572,871 | C | T | 2635 |
| rs62242769 | 5.65E−03 | −0.034334 | 0.262457 | 38,619,266 | A | G | 2636 |
| rs7430438 | 5.68E−03 | −0.031416 | 0.608505 | 38,778,622 | A | G | 2637 |
| rs11714074 | 5.72E−03 | 0.034293 | 0.736918 | 38,618,789 | C | T | 2638 |
| chr3: 39446258 | 5.82E−03 | 0.166981 | 0.011217 | 39,446,258 | C | G | 2639 |
| chr3: 39103060 | 5.94E−03 | 0.120579 | 0.977873 | 39,103,060 | A | G | 2640 |
| chr3: 39249243 | 5.97E−03 | 0.117856 | 0.977845 | 39,249,243 | A | G | 2641 |
| chr3: 39231916 | 6.02E−03 | −0.118132 | 0.02171 | 39,231,916 | C | G | 2642 |
| rs7373076 | 6.04E−03 | 0.037363 | 0.260695 | 38,646,140 | A | G | 2643 |
| chr3: 38822386 | 6.07E−03 | 0.093931 | 0.968499 | 38,822,386 | A | G | 2644 |
| chr3: 38817911 | 6.16E−03 | 0.093725 | 0.968449 | 38,817,911 | C | T | 2645 |
| rs4130467 | 6.19E−03 | 0.033289 | 0.279216 | 38,586,708 | C | T | 2646 |
| chr3: 39595718 | 6.28E−03 | −0.189551 | 0.982702 | 39,595,718 | C | T | 2647 |
| rs13087327 | 6.29E−03 | 0.034945 | 0.267036 | 38,673,893 | A | G | 2648 |
| chr3: 38792243 | 6.29E−03 | −0.085756 | 0.038754 | 38,792,243 | C | T | 2649 |
| rs73054549 | 6.31E−03 | −0.040782 | 0.843494 | 38,631,999 | A | G | 2650 |
| chr3: 38777576 | 6.35E−03 | 0.083656 | 0.959603 | 38,777,576 | G | T | 2651 |
| rs3136660 | 6.35E−03 | −0.229526 | 0.990736 | 39,375,175 | C | G | 2652 |
| chr3: 38791169 | 6.37E−03 | −0.085566 | 0.038776 | 38,791,169 | A | G | 2653 |
| rs41312945 | 6.39E−03 | 0.040691 | 0.156833 | 38,631,849 | A | G | 2654 |
| chr3: 38099684 | 6.48E−03 | −0.070029 | 0.053637 | 38,099,684 | A | G | 2655 |
| chr3: 39454605 | 6.51E−03 | −0.160224 | 0.017293 | 39,454,605 | C | T | 2656 |
| rs3924120 | 6.52E−03 | −0.034552 | 0.746142 | 38,611,159 | A | G | 2657 |
| chr3: 38580815 | 6.55E−03 | −0.168559 | 0.975393 | 38,580,815 | C | T | 2658 |
| chr3: 37778137 | 6.57E−03 | 0.168597 | 0.013076 | 37,778,137 | C | T | 2659 |
| chr3: 38725868 | 6.67E−03 | −0.081703 | 0.039683 | 38,725,868 | C | T | 2660 |
| chr3: 39000860 | 6.70E−03 | 0.118765 | 0.977603 | 39,000,860 | A | G | 2661 |
| rs9824157 | 6.83E−03 | 0.034333 | 0.254027 | 38,608,694 | C | T | 2662 |
| chr3: 38699887 | 6.93E−03 | −0.630395 | 0.996079 | 38,699,887 | C | T | 2663 |
| chr3: 38783400 | 7.01E−03 | 0.084031 | 0.961109 | 38,783,400 | C | T | 2664 |
| chr3: 38979166 | 7.02E−03 | 0.118974 | 0.978204 | 38,979,166 | A | G | 2665 |
| chr3: 37810181 | 7.08E−03 | 0.16429 | 0.008763 | 37,810,181 | C | G | 2666 |
| rs28707243 | 7.22E−03 | −0.043819 | 0.68822 | 38,428,495 | C | T | 2667 |
| chr3: 38825716 | 7.23E−03 | −0.143291 | 0.986259 | 38,825,716 | G | T | 2668 |
| rs4676595 | 7.23E−03 | −0.038325 | 0.272701 | 38,805,897 | T | C | 2669 |
| rs7432787 | 7.26E−03 | 0.032217 | 0.459274 | 38,778,334 | A | T | 2670 |
| rs73054554 | 7.29E−03 | −0.040867 | 0.845257 | 38,633,061 | A | T | 2671 |
| rs13095741 | 7.41E−03 | −0.162981 | 0.986469 | 37,759,529 | G | T | 2672 |
| rs6599219 | 7.42E−03 | −0.034015 | 0.749036 | 38,612,714 | A | G | 2673 |
| chr3: 37800138 | 7.46E−03 | 0.168254 | 0.008244 | 37,800,138 | C | T | 2674 |
| chr3: 38770376 | 7.50E−03 | −0.164004 | 0.014192 | 38,770,376 | A | G | 2675 |
| chr3: 38800367 | 7.62E−03 | −0.165667 | 0.013685 | 38,800,367 | C | T | 2676 |
| rs7630012 | 7.63E−03 | −0.030131 | 0.574903 | 38,527,254 | A | G | 2677 |
| rs7373862 | 7.80E−03 | −0.03378 | 0.748851 | 38,609,347 | A | G | 2678 |
| rs41315501 | 7.85E−03 | 0.086808 | 0.044081 | 38,572,062 | A | G | 2679 |
| chr3: 39532775 | 7.86E−03 | −0.187174 | 0.012477 | 39,532,775 | A | G | 2680 |
| rs73825422 | 7.90E−03 | 0.162604 | 0.008449 | 37,804,876 | C | T | 2681 |
| chr3: 37819864 | 7.98E−03 | −0.157731 | 0.99093 | 37,819,864 | A | C | 2682 |
| rs7622209 | 8.03E−03 | 0.043822 | 0.851599 | 37,957,112 | C | T | 2683 |
| rs3845952 | 8.14E−03 | −0.095967 | 0.032033 | 38,060,814 | A | G | 2684 |
| rs3935184 | 8.21E−03 | 0.03311 | 0.260777 | 38,613,206 | C | G | 2685 |
| chr3: 38468585 | 8.25E−03 | 0.059362 | 0.876416 | 38,468,585 | C | T | 2686 |
| chr3: 38244641 | 8.33E−03 | 0.076019 | 0.03839 | 38,244,641 | A | C | 2687 |
| chr3: 38220480 | 8.34E−03 | −0.076011 | 0.961613 | 38,220,480 | C | T | 2688 |
| rs41312405 | 8.38E−03 | −0.163132 | 0.983185 | 38,593,697 | C | T | 2689 |
| chr3: 38104326 | 8.59E−03 | −0.090104 | 0.028302 | 38,104,326 | A | G | 2690 |
| rs13073053 | 8.70E−03 | 0.157589 | 0.014588 | 37,743,906 | A | T | 2691 |
| chr3: 38509296 | 8.73E−03 | −0.097091 | 0.972927 | 38,509,296 | C | T | 2692 |
| chr3: 39455456 | 8.73E−03 | −0.083959 | 0.048855 | 39,455,456 | A | C | 2693 |
| rs7432727 | 8.74E−03 | 0.029325 | 0.576485 | 38,774,400 | C | T | 2694 |
| chr3: 38244833 | 8.95E−03 | 0.130779 | 0.986126 | 38,244,833 | A | G | 2695 |
| chr3: 38809429 | 9.00E−03 | −0.249112 | 0.003695 | 38,809,429 | C | T | 2696 |
| chr3: 38816737 | 9.02E−03 | −0.248187 | 0.003704 | 38,816,737 | C | T | 2697 |
| chr3: 38823047 | 9.06E−03 | −0.247522 | 0.003714 | 38,823,047 | C | G | 2698 |
| rs73825421 | 9.08E−03 | 0.160725 | 0.008248 | 37,801,321 | A | G | 2699 |
| chr3: 38080696 | 9.08E−03 | 0.080164 | 0.966703 | 38,080,696 | G | T | 2700 |
| chr3: 38827605 | 9.08E−03 | 0.247875 | 0.996288 | 38,827,605 | A | C | 2701 |
| chr3: 38823572 | 9.10E−03 | −0.248426 | 0.003711 | 38,823,572 | A | G | 2702 |
| rs4676617 | 9.11E−03 | 0.02886 | 0.569967 | 39,255,386 | A | C | 2703 |
| chr3: 38595202 | 9.19E−03 | −0.161195 | 0.983701 | 38,595,202 | C | T | 2704 |
| rs13064555 | 9.21E−03 | 0.029079 | 0.512759 | 39,267,390 | A | C | 2705 |
| chr3: 38300747 | 9.61E−03 | −0.074847 | 0.961938 | 38,300,747 | A | G | 2706 |
| chr3: 39120671 | 9.67E−03 | −0.426208 | 0.004981 | 39,120,671 | A | G | 2707 |
| rs12635900 | 9.68E−03 | −0.088637 | 0.975736 | 38,537,396 | A | G | 2708 |
| rs17037819 | 9.68E−03 | −0.088637 | 0.975736 | 38,537,052 | C | T | 2709 |
| rs17037814 | 9.68E−03 | −0.088637 | 0.975737 | 38,536,311 | C | T | 2710 |
| rs17037809 | 9.68E−03 | 0.088637 | 0.024262 | 38,536,083 | A | G | 2711 |
| rs56858708 | 9.70E−03 | 0.088632 | 0.024261 | 38,538,253 | C | T | 2712 |
| rs62239347 | 9.71E−03 | −0.088626 | 0.975742 | 38,539,290 | C | T | 2713 |
| rs62239348 | 9.78E−03 | −0.088605 | 0.975752 | 38,542,729 | A | T | 2714 |
| rs2298422 | 9.78E−03 | −0.091273 | 0.977038 | 38,519,920 | C | T | 2715 |
| rs62239349 | 9.78E−03 | 0.088603 | 0.024247 | 38,543,085 | A | G | 2716 |
| rs62241771 | 9.79E−03 | 0.091276 | 0.022953 | 38,519,423 | C | G | 2717 |
| rs12631864 | 9.82E−03 | 0.088592 | 0.024242 | 38,544,768 | A | G | 2718 |
| rs12638090 | 9.83E−03 | −0.091289 | 0.977106 | 38,516,165 | A | C | 2719 |
| chr3: 37800547 | 9.84E−03 | −0.16015 | 0.991253 | 37,800,547 | A | G | 2720 |
| rs73067109 | 9.85E−03 | −0.08858 | 0.975763 | 38,546,616 | C | T | 2721 |
| chr3: 38525442 | 9.86E−03 | −0.088825 | 0.975861 | 38,525,442 | A | G | 2722 |
| rs2649756 | 9.87E−03 | −0.240937 | 0.990777 | 39,351,489 | C | T | 2723 |
| rs9845438 | 9.88E−03 | −0.03821 | 0.801105 | 38,575,460 | A | C | 2724 |
| rs59854949 | 9.90E−03 | 0.088638 | 0.02419 | 38,533,442 | A | G | 2725 |

Shown is marker identity, p-value of the association, magnitude of effect (in units of fractions of standard deviations), frequency of effect allele, position in NCBI Build 36, identity of effect allele, identity of other allele, SEQ ID for the marker. It should be noted that a positive value for an effect represents a predicted increase in the interval by the effect allele, while a negative value for the effect represents a decrease (i.e. the allele correlated with the negative effect is predictive of a decreased value of the measure).

TABLE 20
Association results for Pacemaker Placement in a
2 Mb region flanking rs6795970 on chromosome 3.

| | | | | | | effect | other | SEQ ID |
|---|---|---|---|---|---|---|---|---|
| marker | p-value | OR | freq aff | freq ctl | position | allele | allele | NO: |
| rs28501975 | 5.02E−04 | 0.758009 | 0.784217 | 0.811755 | 39,003,800 | A | T | 1364 |
| rs62244116 | 5.14E−04 | 0.676534 | 0.909373 | 0.928362 | 38,820,551 | A | C | 1365 |
| rs2239621 | 1.09E−03 | 1.211487 | 0.284918 | 0.249552 | 38,148,737 | T | C | 1366 |
| rs62244210 | 1.21E−03 | 0.71302 | 0.904603 | 0.923717 | 39,275,690 | A | G | 1367 |
| rs630934 | 1.39E−03 | 1.177481 | 0.50036 | 0.460187 | 39,464,623 | T | G | 1368 |
| chr3: 39383527 | 1.39E−03 | 109.219528 | 0.998154 | 0.995679 | 39,383,527 | C | G | 1369 |
| chr3: 38742425 | 1.41E−03 | 0.683169 | 0.923832 | 0.940342 | 38,742,425 | A | G | 1370 |
| rs28810495 | 1.48E−03 | 0.837803 | 0.678286 | 0.714649 | 39,485,659 | A | G | 1371 |
| chr3: 39333429 | 1.61E−03 | 0.012679 | 0.001835 | 0.004332 | 39,333,429 | C | T | 1372 |
| chr3: 39628515 | 1.62E−03 | 0.437758 | 0.980605 | 0.987523 | 39,628,515 | C | T | 1373 |
| chr3: 39620185 | 1.71E−03 | 2.277005 | 0.019384 | 0.012475 | 39,620,185 | A | G | 1374 |
| rs7434229 | 1.88E−03 | 1.239965 | 0.839246 | 0.809734 | 38,945,625 | C | T | 1375 |
| chr3: 38766563 | 1.92E−03 | 0.255389 | 0.984393 | 0.988656 | 38,766,563 | C | T | 1376 |
| rs1278142 | 1.95E−03 | 1.170341 | 0.502359 | 0.463197 | 39,458,156 | C | T | 1377 |
| chr3: 39580601 | 1.96E−03 | 0.440326 | 0.980702 | 0.987475 | 39,580,601 | A | C | 1378 |
| rs2370969 | 1.98E−03 | 1.18672 | 0.582051 | 0.546054 | 39,511,151 | C | T | 1379 |
| rs13067227 | 2.00E−03 | 1.268851 | 0.799701 | 0.773381 | 39,485,556 | C | T | 1380 |
| chr3: 39059469 | 2.01E−03 | 1.269706 | 0.856504 | 0.830225 | 39,059,469 | A | G | 1381 |
| rs478514 | 2.05E−03 | 0.855401 | 0.499843 | 0.53889 | 39,475,377 | C | T | 1382 |
| rs11708828 | 2.08E−03 | 1.168689 | 0.50035 | 0.461337 | 39,474,653 | C | T | 1383 |
| rs694611 | 2.10E−03 | 0.855756 | 0.499485 | 0.538453 | 39,473,151 | C | G | 1384 |
| rs4676496 | 2.10E−03 | 1.168551 | 0.50053 | 0.461567 | 39,473,009 | A | G | 1385 |
| rs645567 | 2.10E−03 | 0.85577 | 0.499525 | 0.538504 | 39,473,515 | A | G | 1386 |
| rs615479 | 2.13E−03 | 0.855581 | 0.497037 | 0.535862 | 39,461,604 | C | G | 1387 |
| rs68181851 | 2.19E−03 | 1.175121 | 0.572661 | 0.535074 | 37,806,100 | A | C | 1388 |
| rs6765697 | 2.21E−03 | 1.167603 | 0.501108 | 0.462301 | 39,468,243 | C | T | 1389 |
| rs34403692 | 2.22E−03 | 0.856519 | 0.498865 | 0.537664 | 39,468,064 | A | G | 1390 |
| rs9852186 | 2.22E−03 | 1.167447 | 0.501214 | 0.462435 | 39,467,598 | A | C | 1391 |
| chr3: 39307244 | 2.23E−03 | 0.018392 | 0.002035 | 0.004505 | 39,307,244 | A | G | 1392 |
| rs6772037 | 2.25E−03 | 1.167223 | 0.501339 | 0.462595 | 39,466,933 | A | G | 1393 |
| rs11129835 | 2.25E−03 | 0.856792 | 0.498068 | 0.536813 | 39,463,456 | C | T | 1394 |
| rs6774232 | 2.30E−03 | 1.166673 | 0.501546 | 0.462858 | 39,465,877 | C | G | 1395 |
| rs2370964 | 2.34E−03 | 1.166273 | 0.50171 | 0.463066 | 39,465,065 | C | T | 1396 |
| rs2887901 | 2.34E−03 | 0.85743 | 0.498297 | 0.536943 | 39,465,100 | A | G | 1397 |
| rs533577 | 2.37E−03 | 0.85764 | 0.498207 | 0.536828 | 39,464,655 | C | T | 1398 |
| rs9820623 | 2.47E−03 | 1.166828 | 0.50486 | 0.466754 | 39,468,862 | G | T | 1399 |
| chr3: 39725781 | 2.54E−03 | 2.089805 | 0.019651 | 0.0124 | 39,725,781 | C | T | 1400 |
| rs62243409 | 2.64E−03 | 1.342543 | 0.10326 | 0.084199 | 39,519,641 | C | T | 1401 |
| rs34457487 | 2.80E−03 | 0.85507 | 0.531806 | 0.568339 | 39,485,309 | A | G | 1402 |
| rs12636153 | 2.92E−03 | 1.202702 | 0.791481 | 0.760172 | 38,744,301 | A | C | 1403 |
| chr3: 39481484 | 3.09E−03 | 0.022599 | 0.002863 | 0.005187 | 39,481,484 | A | G | 1404 |
| rs62243433 | 3.11E−03 | 0.744922 | 0.899236 | 0.917674 | 39,570,468 | C | T | 1405 |
| rs62244135 | 3.14E−03 | 1.365478 | 0.098877 | 0.081522 | 38,864,832 | C | T | 1406 |
| chr3: 38515142 | 3.17E−03 | 0.038445 | 0.006958 | 0.009091 | 38,515,142 | A | G | 1407 |
| rs13081054 | 3.19E−03 | 0.857821 | 0.450985 | 0.487457 | 39,447,451 | A | G | 1408 |
| rs13067055 | 3.30E−03 | 1.176356 | 0.339664 | 0.305836 | 39,485,521 | A | G | 1409 |
| rs2233204 | 3.35E−03 | 0.831243 | 0.357798 | 0.387931 | 39,529,790 | T | C | 1410 |
| rs28362641 | 3.49E−03 | 1.22686 | 0.84275 | 0.815361 | 39,124,578 | C | T | 1411 |
| chr3: 38895721 | 3.62E−03 | 0.799103 | 0.758659 | 0.78256 | 38,895,721 | A | C | 1412 |
| rs674243 | 3.91E−03 | 0.86087 | 0.461902 | 0.49759 | 39,453,699 | C | T | 1413 |
| rs28615971 | 3.94E−03 | 1.175123 | 0.453796 | 0.420816 | 39,454,994 | C | G | 1414 |
| rs4955408 | 3.96E−03 | 1.171853 | 0.325634 | 0.292177 | 38,227,410 | A | G | 1415 |
| chr3: 39636519 | 3.96E−03 | 0.551702 | 0.028023 | 0.03769 | 39,636,519 | C | T | 1416 |
| rs4622847 | 4.00E−03 | 0.842279 | 0.260874 | 0.292191 | 38,799,347 | A | G | 1417 |
| rs7433733 | 4.15E−03 | 0.817746 | 0.167803 | 0.194591 | 38,945,628 | A | G | 1418 |
| chr3: 38801183 | 4.18E−03 | 0.840125 | 0.724404 | 0.754256 | 38,801,183 | A | G | 1419 |
| rs12638676 | 4.31E−03 | 1.159461 | 0.521705 | 0.486409 | 39,477,729 | A | G | 1420 |
| rs73064540 | 4.47E−03 | 1.186521 | 0.275273 | 0.245355 | 38,796,286 | A | T | 1421 |
| rs12495623 | 4.47E−03 | 0.863222 | 0.462036 | 0.497316 | 39,454,885 | G | T | 1422 |
| rs2507948 | 4.52E−03 | 0.862397 | 0.416218 | 0.451517 | 37,807,176 | A | G | 1423 |
| rs59856101 | 4.59E−03 | 1.185264 | 0.275653 | 0.245695 | 38,794,198 | A | C | 1424 |
| rs1513219 | 4.60E−03 | 0.852954 | 0.694411 | 0.72649 | 39,508,763 | C | T | 1425 |
| rs545397 | 4.62E−03 | 0.853093 | 0.694258 | 0.726361 | 39,505,087 | C | T | 1426 |
| rs616147 | 4.63E−03 | 1.172133 | 0.305813 | 0.273703 | 39,509,485 | A | G | 1427 |
| rs1009966 | 4.63E−03 | 1.157587 | 0.538142 | 0.502899 | 39,448,595 | A | G | 1428 |
| rs11129833 | 4.67E−03 | 1.157403 | 0.538182 | 0.502958 | 39,451,385 | G | T | 1429 |
| rs11706071 | 4.71E−03 | 0.863383 | 0.486405 | 0.521263 | 39,467,250 | A | C | 1430 |
| rs1708104 | 4.76E−03 | 0.852722 | 0.696181 | 0.728 | 39,509,746 | C | T | 1431 |
| rs1768208 | 4.76E−03 | 0.855002 | 0.694546 | 0.726881 | 39,498,007 | C | T | 1432 |
| rs62244161 | 4.78E−03 | 0.740111 | 0.907426 | 0.923811 | 39,175,081 | C | T | 1433 |
| chr3: 38717393 | 4.82E−03 | 1.319818 | 0.108924 | 0.091101 | 38,717,393 | A | G | 1434 |
| rs34897882 | 4.83E−03 | 1.156535 | 0.538542 | 0.50349 | 39,473,313 | C | T | 1435 |
| rs59858965 | 4.85E−03 | 1.192378 | 0.795546 | 0.766126 | 38,742,965 | A | C | 1436 |
| rs2853709 | 4.85E−03 | 1.193126 | 0.671223 | 0.642136 | 39,297,829 | C | T | 1437 |
| rs7638977 | 4.86E−03 | 1.156463 | 0.536172 | 0.50115 | 39,448,105 | A | T | 1438 |
| rs59468016 | 4.93E−03 | 0.83887 | 0.204425 | 0.233746 | 38,743,251 | A | G | 1439 |
| rs1768190 | 4.94E−03 | 0.855271 | 0.693726 | 0.725856 | 39,484,444 | C | T | 1440 |
| chr3: 39419719 | 4.95E−03 | 0.785786 | 0.174864 | 0.196376 | 39,419,719 | A | C | 1441 |
| rs57326399 | 4.98E−03 | 0.839015 | 0.20442 | 0.233723 | 38,743,304 | C | T | 1442 |
| rs12495185 | 5.01E−03 | 0.865172 | 0.463693 | 0.498656 | 39,447,794 | A | G | 1443 |
| rs28362640 | 5.06E−03 | 0.820326 | 0.151199 | 0.17724 | 39,124,871 | C | G | 1444 |
| rs11129834 | 5.16E−03 | 1.155047 | 0.53972 | 0.504857 | 39,463,350 | A | G | 1445 |
| rs879444 | 5.23E−03 | 1.155695 | 0.538959 | 0.504325 | 39,454,482 | C | T | 1446 |
| rs784504 | 5.25E−03 | 1.250931 | 0.77194 | 0.749283 | 39,170,264 | C | G | 1447 |
| rs35310432 | 5.32E−03 | 1.154438 | 0.535008 | 0.500236 | 39,449,962 | A | G | 1448 |
| rs6770797 | 5.34E−03 | 0.866379 | 0.460599 | 0.495323 | 39,464,881 | A | C | 1449 |
| rs6770798 | 5.34E−03 | 1.154228 | 0.539401 | 0.504677 | 39,464,883 | C | T | 1450 |
| rs11711484 | 5.46E−03 | 0.865553 | 0.469903 | 0.504277 | 39,251,905 | C | T | 1451 |
| rs11129832 | 5.48E−03 | 1.153751 | 0.534306 | 0.499636 | 39,447,529 | C | T | 1452 |
| rs13059755 | 5.48E−03 | 1.154013 | 0.536713 | 0.502161 | 39,459,515 | C | T | 1453 |
| rs2685080 | 5.54E−03 | 1.207319 | 0.186069 | 0.160236 | 37,807,390 | C | T | 1454 |
| chr3: 39475164 | 5.54E−03 | 0.867 | 0.465296 | 0.499902 | 39,475,164 | C | T | 1455 |
| rs11705945 | 5.58E−03 | 1.153651 | 0.536358 | 0.501863 | 39,459,727 | A | G | 1456 |
| rs34029841 | 5.59E−03 | 0.866961 | 0.463788 | 0.498354 | 39,460,244 | C | G | 1457 |
| rs34629457 | 5.62E−03 | 1.153239 | 0.53709 | 0.502572 | 39,466,571 | C | T | 1458 |
| rs12494100 | 5.65E−03 | 0.867271 | 0.465677 | 0.500222 | 39,456,839 | A | G | 1459 |
| rs2685108 | 5.73E−03 | 0.865994 | 0.410317 | 0.444678 | 37,804,178 | A | T | 1460 |
| rs11709075 | 5.78E−03 | 0.867743 | 0.466225 | 0.500703 | 39,475,249 | A | G | 1461 |
| rs11709044 | 5.78E−03 | 0.867767 | 0.466242 | 0.500715 | 39,475,204 | A | G | 1462 |
| chr3: 39299837 | 5.80E−03 | 3.75544 | 0.006409 | 0.003293 | 39,299,837 | C | T | 1463 |
| rs7635472 | 5.85E−03 | 0.86268 | 0.486717 | 0.519656 | 38,839,391 | C | T | 1464 |
| rs34786326 | 5.86E−03 | 1.188305 | 0.798347 | 0.769646 | 38,744,872 | C | T | 1465 |
| rs57345776 | 5.94E−03 | 1.161993 | 0.475101 | 0.442742 | 39,285,273 | C | T | 1466 |
| rs9875428 | 5.99E−03 | 1.153642 | 0.590449 | 0.556231 | 37,804,795 | G | T | 1467 |
| chr3: 39605077 | 6.06E−03 | 0.584316 | 0.030771 | 0.040466 | 39,605,077 | C | T | 1468 |
| rs56055643 | 6.25E−03 | 0.866782 | 0.448097 | 0.481755 | 39,447,633 | A | G | 1469 |
| chr3: 38218161 | 6.28E−03 | 1.372684 | 0.925825 | 0.909997 | 38,218,161 | C | T | 1470 |
| rs11919723 | 6.31E−03 | 1.196594 | 0.702611 | 0.675651 | 38,846,846 | C | T | 1471 |
| chr3: 39551395 | 6.38E−03 | 1.262307 | 0.21739 | 0.197127 | 39,551,395 | C | T | 1472 |
| rs4525803 | 6.44E−03 | 1.150037 | 0.5348 | 0.500686 | 39,465,626 | G | T | 1473 |
| rs2844399 | 6.45E−03 | 0.868295 | 0.407435 | 0.441449 | 37,806,039 | A | G | 1474 |
| rs36020975 | 6.55E−03 | 0.869873 | 0.466298 | 0.500324 | 39,466,484 | A | G | 1475 |
| rs3914283 | 6.61E−03 | 0.870034 | 0.466347 | 0.500348 | 39,466,288 | C | T | 1476 |
| rs62242335 | 6.67E−03 | 0.74884 | 0.908245 | 0.924044 | 39,153,249 | C | T | 1477 |
| chr3: 39253174 | 6.80E−03 | 1.235129 | 0.831869 | 0.80919 | 39,253,174 | C | T | 1478 |
| rs9874436 | 6.94E−03 | 1.146546 | 0.507488 | 0.473256 | 38,750,328 | C | G | 1479 |
| chr3: 38350073 | 6.96E−03 | 0.144084 | 0.010385 | 0.013048 | 38,350,073 | A | C | 1480 |
| chr3: 38249507 | 7.04E−03 | 0.731922 | 0.074308 | 0.089932 | 38,249,507 | A | G | 1481 |
| rs13073538 | 7.30E−03 | 1.150118 | 0.544753 | 0.511691 | 39,449,416 | A | G | 1482 |
| rs7651106 | 7.31E−03 | 0.862035 | 0.690583 | 0.721358 | 38,779,345 | C | T | 32 |
| rs62244166 | 7.33E−03 | 1.333524 | 0.088571 | 0.07304 | 39,203,680 | G | T | 1483 |
| rs631312 | 7.33E−03 | 0.860145 | 0.700744 | 0.731099 | 39,483,972 | A | G | 1484 |
| rs6599257 | 7.47E−03 | 1.159476 | 0.309123 | 0.278357 | 38,779,592 | C | T | 33 |
| rs4679028 | 7.47E−03 | 1.164386 | 0.28287 | 0.252867 | 38,302,296 | A | G | 1485 |
| rs56040630 | 7.52E−03 | 0.86214 | 0.690921 | 0.721537 | 38,785,529 | C | T | 1486 |
| rs12497173 | 7.52E−03 | 1.159353 | 0.309116 | 0.27837 | 38,780,394 | G | T | 1487 |
| rs4417808 | 7.52E−03 | 1.159834 | 0.30907 | 0.278445 | 38,785,241 | A | G | 1488 |
| rs11927034 | 7.55E−03 | 0.864306 | 0.383319 | 0.414973 | 39,569,436 | C | G | 1489 |
| rs9311197 | 7.58E−03 | 1.145221 | 0.492242 | 0.458508 | 38,751,607 | A | G | 1490 |
| rs7610489 | 7.59E−03 | 1.159292 | 0.309106 | 0.278387 | 38,781,482 | A | G | 34 |
| rs59669930 | 7.60E−03 | 1.159294 | 0.309106 | 0.278388 | 38,781,515 | C | T | 1491 |
| rs10212338 | 7.67E−03 | 1.16007 | 0.309065 | 0.278611 | 38,787,654 | A | G | 37 |
| chr3: 38311897 | 7.72E−03 | 0.756957 | 0.909754 | 0.925772 | 38,311,897 | C | T | 1492 |
| rs9809798 | 7.72E−03 | 1.144791 | 0.492611 | 0.458935 | 38,748,809 | A | C | 1493 |
| rs6777775 | 7.77E−03 | 0.868157 | 0.550334 | 0.582424 | 38,796,125 | A | G | 1494 |
| rs13095741 | 7.85E−03 | 0.532327 | 0.979944 | 0.986614 | 37,759,529 | G | T | 1495 |
| chr3: 38784696 | 7.91E−03 | 0.610406 | 0.019851 | 0.029748 | 38,784,696 | C | T | 1496 |
| rs2685111 | 7.93E−03 | 0.837856 | 0.812896 | 0.838119 | 37,801,178 | A | G | 1497 |
| rs7428167 | 8.04E−03 | 0.874184 | 0.507512 | 0.54102 | 38,753,195 | C | T | 1498 |
| rs17737239 | 8.10E−03 | 0.781659 | 0.885235 | 0.903005 | 39,334,643 | C | T | 1499 |
| chr3: 37778137 | 8.19E−03 | 1.887906 | 0.019402 | 0.012935 | 37,778,137 | C | T | 1500 |
| rs871144 | 8.20E−03 | 1.166098 | 0.701942 | 0.672415 | 39,297,470 | C | T | 1501 |
| rs62242444 | 8.28E−03 | 1.178226 | 0.797308 | 0.769601 | 38,752,237 | C | T | 1502 |
| rs1464047 | 8.30E−03 | 1.147022 | 0.524285 | 0.491616 | 39,501,878 | C | T | 1503 |
| rs62242448 | 8.46E−03 | 0.849142 | 0.202727 | 0.230358 | 38,755,623 | A | C | 1504 |
| rs938183 | 8.47E−03 | 0.869736 | 0.472896 | 0.504767 | 39,455,298 | A | G | 1505 |
| rs11926158 | 8.52E−03 | 0.858034 | 0.305224 | 0.334433 | 38,798,319 | C | G | 1506 |
| rs60554541 | 8.57E−03 | 1.177315 | 0.797254 | 0.769665 | 38,757,476 | A | G | 1507 |
| chr3: 39731526 | 8.61E−03 | 2.161184 | 0.989523 | 0.983045 | 39,731,526 | A | G | 1508 |
| rs2844397 | 8.64E−03 | 1.18509 | 0.214625 | 0.188864 | 37,801,726 | A | G | 1509 |
| rs13079368 | 8.78E−03 | 1.144229 | 0.519979 | 0.487262 | 39,487,555 | C | T | 1510 |
| rs11915103 | 8.79E−03 | 0.783485 | 0.884493 | 0.902057 | 39,326,735 | C | T | 1511 |
| rs7617919 | 8.90E−03 | 0.850085 | 0.202759 | 0.230229 | 38,768,993 | A | G | 1512 |
| rs60969309 | 8.91E−03 | 0.850127 | 0.202802 | 0.230268 | 38,763,008 | C | T | 1513 |
| rs6599252 | 8.92E−03 | 0.850168 | 0.202797 | 0.230255 | 38,764,695 | A | T | 1514 |
| rs12634001 | 8.94E−03 | 0.850219 | 0.202805 | 0.230261 | 38,763,702 | A | G | 1515 |
| rs7610619 | 9.25E−03 | 1.37702 | 0.956126 | 0.941878 | 39,161,204 | C | G | 1516 |
| chr3: 39582012 | 9.43E−03 | 2.104265 | 0.987645 | 0.98116 | 39,582,012 | C | T | 1517 |
| rs7621922 | 9.47E−03 | 1.37551 | 0.956094 | 0.941882 | 39,161,154 | A | C | 1518 |
| rs7625290 | 9.49E−03 | 1.38246 | 0.057364 | 0.044456 | 38,153,294 | G | T | 1519 |
| rs194707 | 9.50E−03 | 0.850156 | 0.708215 | 0.734736 | 38,330,719 | A | G | 1520 |
| rs28863770 | 9.70E−03 | 2.099834 | 0.987677 | 0.981214 | 39,597,342 | G | T | 1521 |
| rs34743428 | 9.73E−03 | 0.862405 | 0.622513 | 0.651498 | 39,573,199 | A | T | 1522 |
| rs2229528 | 9.87E−03 | 1.346881 | 0.920444 | 0.90548 | 38,142,099 | A | G | 1523 |
| chr3: 39282836 | 9.92E−03 | 1.9354 | 0.016904 | 0.010925 | 39,282,836 | C | T | 1524 |
| chr3: 39598938 | 9.93E−03 | 4.304103 | 0.992819 | 0.98961 | 39,598,938 | C | T | 1525 |
| rs13073053 | 9.97E−03 | 1.838771 | 0.020947 | 0.014446 | 37,743,906 | A | T | 1526 |

Shown is marker identity, p-value of the association, odds ratio (OR), frequency of effect allele in affecteds and controls, position in NCBI Build 36, identity of effect allele, identity of other allele, and Seq ID for the marker. It should be noted that when reported OR values are larger than unity, the effect allele is the at-risk allele, while, when reported OR values are less than unity, the effect allele is the protective allele, and the other allele is the at-risk allele. The OR value for the at-risk allele is in those cases equal to 1/OR for the protective (effect) allele.

TABLE 21
Association results for Heart Rate in a 2 Mb
region flanking rs365990 on chromosome 14.

| | | | | | effect | other | SEQ ID |
|---|---|---|---|---|---|---|---|
| marker | p-value | effect | freq | position | allele | allele | NO: |
| rs412768 | 9.26E−08 | −0.060282 | 0.711016 | 22,936,553 | T | C | 300 |
| rs445754 | 3.76E−07 | −0.061402 | 0.776285 | 22,933,642 | G | T | 297 |
| rs7155512 | 8.29E−07 | 0.092466 | 0.903438 | 22,838,709 | A | G | 1195 |
| rs56230144 | 9.23E−07 | 0.204067 | 0.9568 | 23,005,073 | C | T | 1196 |
| rs365990 | 1.32E−06 | −0.051564 | 0.661001 | 22,931,651 | A | G | 296 |
| rs422068 | 2.46E−06 | 0.051142 | 0.321833 | 22,934,644 | C | T | 1197 |
| rs452036 | 2.77E−06 | 0.049966 | 0.332923 | 22,935,725 | A | G | 299 |
| rs10438012 | 3.79E−06 | 0.095621 | 0.927681 | 22,861,062 | G | T | 1198 |
| rs403739 | 4.05E−06 | 0.050182 | 0.31069 | 22,938,616 | C | T | 1199 |
| rs7161630 | 4.14E−06 | −0.083217 | 0.107745 | 22,839,004 | C | T | 1200 |
| rs6573092 | 4.70E−06 | 0.101004 | 0.936831 | 22,842,180 | A | G | 1201 |
| chr14: 22936019 | 7.95E−06 | −0.280387 | 0.018172 | 22,936,019 | A | G | 1202 |
| rs432256 | 9.16E−06 | 0.052363 | 0.239976 | 22,940,592 | A | G | 1203 |
| rs403720 | 1.00E−05 | −0.052126 | 0.75906 | 22,938,868 | C | T | 1204 |
| rs439735 | 1.06E−05 | 0.051958 | 0.241396 | 22,938,125 | A | G | 301 |
| rs388914 | 1.14E−05 | 0.052184 | 0.235557 | 22,942,932 | A | G | 302 |
| rs2277474 | 1.29E−05 | −0.052338 | 0.762711 | 22,944,363 | C | T | 304 |
| rs1950252 | 1.48E−05 | −0.089798 | 0.063048 | 22,848,538 | A | G | 1205 |
| rs9323298 | 1.50E−05 | −0.089783 | 0.063031 | 22,852,609 | A | G | 1206 |
| rs10146155 | 1.51E−05 | −0.089785 | 0.063027 | 22,856,475 | A | G | 1207 |
| rs10134354 | 1.51E−05 | 0.089785 | 0.936973 | 22,856,476 | A | C | 1208 |
| rs7142474 | 1.54E−05 | 0.090012 | 0.937191 | 22,855,445 | A | G | 1209 |
| rs7161120 | 1.60E−05 | 0.089766 | 0.936997 | 22,867,041 | C | G | 1210 |
| rs1955559 | 1.66E−05 | −0.090756 | 0.062002 | 22,857,807 | A | G | 1211 |
| rs8020117 | 2.34E−05 | 0.084785 | 0.92704 | 22,861,859 | C | T | 1212 |
| chr14: 22962537 | 2.95E−05 | −0.598248 | 0.009444 | 22,962,537 | C | G | 1213 |
| rs376439 | 3.07E−05 | −0.044229 | 0.649176 | 22,938,869 | A | G | 1214 |
| rs440466 | 3.82E−05 | 0.044032 | 0.350475 | 22,943,957 | C | T | 303 |
| rs12147570 | 6.50E−05 | 0.058293 | 0.153294 | 22,951,760 | T | G | 306 |
| chr14: 22984943 | 7.89E−05 | 0.313082 | 0.987441 | 22,984,943 | A | C | 1215 |
| rs178640 | 9.52E−05 | −0.048306 | 0.55051 | 22,925,409 | A | G | 1216 |
| rs28730774 | 1.06E−04 | −0.179402 | 0.026907 | 22,936,280 | A | G | 1217 |
| rs2231801 | 1.22E−04 | 0.119449 | 0.966129 | 22,899,330 | C | T | 1218 |
| chr14: 22924192 | 1.48E−04 | −0.045942 | 0.52553 | 22,924,192 | A | T | 1219 |
| rs74037001 | 1.65E−04 | −0.062767 | 0.888893 | 22,917,034 | A | G | 1220 |
| rs178636 | 1.66E−04 | −0.045747 | 0.514228 | 22,921,714 | A | G | 1221 |
| rs73602471 | 1.67E−04 | −0.091203 | 0.051562 | 22,833,285 | A | G | 1222 |
| rs7145023 | 1.78E−04 | −0.051281 | 0.842778 | 22,952,429 | C | T | 1223 |
| rs3729833 | 1.78E−04 | −0.051281 | 0.842776 | 22,953,024 | C | T | 310 |
| rs3729825 | 1.78E−04 | −0.051284 | 0.842746 | 22,956,104 | C | T | 315 |
| rs735711 | 1.82E−04 | −0.051467 | 0.841435 | 22,968,867 | C | T | 1224 |
| rs12147533 | 1.86E−04 | −0.051175 | 0.842005 | 22,960,531 | A | G | 319 |
| rs396024 | 1.92E−04 | −0.064077 | 0.903422 | 22,925,318 | C | G | 1225 |
| rs45520434 | 1.93E−04 | −0.064042 | 0.90349 | 22,925,266 | C | T | 1226 |
| rs382872 | 1.94E−04 | 0.06403 | 0.096503 | 22,925,160 | A | G | 1227 |
| rs8004990 | 1.94E−04 | 0.063991 | 0.096523 | 22,923,995 | A | G | 1228 |
| rs10149621 | 1.95E−04 | −0.184387 | 0.049272 | 23,049,920 | G | T | 1229 |
| rs11624298 | 1.96E−04 | 0.063889 | 0.096403 | 22,922,992 | A | G | 1230 |
| rs453361 | 1.97E−04 | −0.063811 | 0.903618 | 22,921,240 | C | T | 1231 |
| rs433673 | 1.98E−04 | −0.063787 | 0.903624 | 22,920,742 | A | G | 1232 |
| chr14: 22919821 | 2.00E−04 | 0.063845 | 0.096264 | 22,919,821 | A | G | 1233 |
| chr14: 22919370 | 2.04E−04 | −0.063925 | 0.903902 | 22,919,370 | C | T | 1234 |
| chr14: 22919323 | 2.05E−04 | −0.063933 | 0.903919 | 22,919,323 | C | T | 1235 |
| rs451794 | 2.16E−04 | −0.063726 | 0.879057 | 22,928,072 | C | T | 1236 |
| chr14: 22954770 | 2.20E−04 | −0.595327 | 0.00779 | 22,954,770 | C | G | 1237 |
| rs45553533 | 2.62E−04 | 0.171455 | 0.974094 | 22,952,736 | C | T | 1238 |
| rs28535772 | 2.73E−04 | 0.049575 | 0.377413 | 22,936,984 | C | T | 1239 |
| chr14: 22673837 | 2.74E−04 | −0.138528 | 0.028992 | 22,673,837 | A | C | 1240 |
| rs2331979 | 2.86E−04 | −0.04045 | 0.682866 | 22,952,695 | A | G | 309 |
| chr14: 22966495 | 3.12E−04 | 0.591667 | 0.992522 | 22,966,495 | C | T | 1241 |
| rs178638 | 3.50E−04 | −0.043533 | 0.522228 | 22,924,164 | A | G | 1242 |
| chr14: 22936498 | 4.15E−04 | 0.591641 | 0.992777 | 22,936,498 | C | T | 1243 |
| rs723840 | 4.76E−04 | −0.042762 | 0.544287 | 22,918,151 | C | T | 1244 |
| chr14: 22412337 | 4.84E−04 | −0.115223 | 0.031937 | 22,412,337 | A | G | 1245 |
| chr14: 22715214 | 4.94E−04 | −0.117037 | 0.037954 | 22,715,214 | A | T | 1246 |
| chr14: 22397976 | 5.34E−04 | −0.111712 | 0.033185 | 22,397,976 | C | T | 1247 |
| rs4981468 | 5.37E−04 | −0.086043 | 0.041861 | 22,867,359 | A | G | 1248 |
| rs1535094 | 5.41E−04 | −0.086434 | 0.041667 | 22,849,474 | C | G | 1249 |
| rs10438119 | 5.87E−04 | 0.109608 | 0.965714 | 22,395,924 | C | T | 1250 |
| rs2754163 | 6.00E−04 | 0.039826 | 0.26027 | 22,967,347 | C | T | 322 |
| rs743567 | 6.32E−04 | −0.039097 | 0.696112 | 22,960,822 | A | C | 320 |
| rs7157716 | 6.45E−04 | −0.039578 | 0.740816 | 22,962,728 | A | G | 321 |
| chr14: 22936987 | 6.50E−04 | 0.051127 | 0.218558 | 22,936,987 | C | T | 1251 |
| chr14: 23430078 | 6.91E−04 | −0.170432 | 0.970111 | 23,430,078 | A | G | 1252 |
| chr14: 23578000 | 6.97E−04 | −0.206665 | 0.97524 | 23,578,000 | G | T | 1253 |
| chr14: 22742893 | 6.98E−04 | 0.084349 | 0.945903 | 22,742,893 | C | T | 1254 |
| rs11621983 | 7.49E−04 | −0.081523 | 0.059298 | 21,965,326 | A | G | 1255 |
| chr14: 23824127 | 7.54E−04 | −0.232008 | 0.993245 | 23,824,127 | A | C | 1256 |
| rs8019322 | 7.88E−04 | 0.03892 | 0.258234 | 22,962,421 | C | T | 1257 |
| chr14: 23798859 | 8.12E−04 | 0.256819 | 0.007195 | 23,798,859 | C | T | 1258 |
| rs45508899 | 8.22E−04 | −0.058559 | 0.876563 | 22,862,256 | A | C | 1259 |
| rs11849140 | 8.48E−04 | 0.163294 | 0.967882 | 23,028,156 | A | C | 1260 |
| rs7140721 | 9.19E−04 | 0.037915 | 0.296376 | 22,955,534 | A | G | 312 |
| chr14: 23515571 | 1.02E−03 | −0.204913 | 0.97704 | 23,515,571 | C | T | 1261 |
| chr14: 22386328 | 1.05E−03 | −0.110207 | 0.033748 | 22,386,328 | A | G | 1262 |
| rs765020 | 1.08E−03 | −0.035969 | 0.683431 | 22,953,579 | A | G | 1263 |
| rs8022522 | 1.25E−03 | 0.042912 | 0.344311 | 22,927,191 | A | G | 295 |
| rs7143356 | 1.35E−03 | 0.035248 | 0.31552 | 22,950,923 | C | T | 305 |
| chr14: 22830264 | 1.35E−03 | 0.080223 | 0.94409 | 22,830,264 | A | G | 1264 |
| rs61731179 | 1.37E−03 | −0.098117 | 0.055699 | 22,939,833 | A | G | 1265 |
| rs59799414 | 1.38E−03 | 0.035152 | 0.315779 | 22,955,837 | A | G | 1266 |
| rs2284651 | 1.38E−03 | 0.035172 | 0.31532 | 22,951,984 | C | T | 307 |
| rs3729829 | 1.38E−03 | 0.035168 | 0.315414 | 22,955,727 | A | G | 313 |
| rs7149517 | 1.39E−03 | 0.035159 | 0.315279 | 22,952,026 | G | T | 308 |
| rs765021 | 1.42E−03 | 0.035107 | 0.315106 | 22,953,439 | A | G | 311 |
| rs7159367 | 1.52E−03 | 0.034811 | 0.316165 | 22,957,485 | C | T | 316 |
| rs7145543 | 1.53E−03 | −0.034943 | 0.685438 | 22,952,400 | A | G | 1267 |
| rs1055061 | 1.55E−03 | 0.067996 | 0.944532 | 22,814,772 | C | T | 1268 |
| rs12894524 | 1.56E−03 | −0.034694 | 0.68378 | 22,957,880 | G | T | 317 |
| rs2277475 | 1.60E−03 | −0.035099 | 0.687998 | 22,958,505 | A | T | 318 |
| chr14: 23515358 | 1.65E−03 | 0.186672 | 0.025027 | 23,515,358 | A | C | 1269 |
| rs178762 | 1.78E−03 | −0.144588 | 0.019868 | 22,775,560 | C | T | 1270 |
| rs28631169 | 2.11E−03 | −0.038754 | 0.800716 | 22,958,023 | C | T | 1271 |
| rs55752686 | 2.14E−03 | −0.0786 | 0.053148 | 22,101,197 | C | T | 1272 |
| chr14: 22875956 | 2.42E−03 | −0.20096 | 0.015885 | 22,875,956 | A | G | 1273 |
| rs28564768 | 2.65E−03 | 0.061555 | 0.925538 | 21,942,608 | A | G | 1274 |
| chr14: 22822490 | 2.76E−03 | 0.072671 | 0.952063 | 22,822,490 | C | G | 1275 |
| rs434273 | 2.84E−03 | 0.038831 | 0.740022 | 22,942,506 | C | T | 1276 |
| chr14: 23469758 | 3.38E−03 | 0.155708 | 0.027016 | 23,469,758 | A | G | 1277 |
| chr14: 22821045 | 3.39E−03 | −0.071615 | 0.047713 | 22,821,045 | A | G | 1278 |
| chr14: 23415421 | 3.41E−03 | 0.168099 | 0.021891 | 23,415,421 | A | G | 1279 |
| chr14: 23927040 | 3.48E−03 | −0.238325 | 0.007866 | 23,927,040 | A | G | 1280 |
| chr14: 21945342 | 3.49E−03 | −0.057506 | 0.077776 | 21,945,342 | A | G | 1281 |
| rs72686239 | 3.50E−03 | −0.047909 | 0.853155 | 22,990,121 | A | G | 1282 |
| rs8003073 | 3.52E−03 | −0.064533 | 0.938924 | 22,911,233 | C | T | 1283 |
| rs11626025 | 3.53E−03 | 0.057762 | 0.922399 | 21,961,632 | G | T | 1284 |
| rs178641 | 3.64E−03 | 0.186101 | 0.978764 | 22,926,238 | C | T | 1285 |
| chr14: 23901245 | 3.67E−03 | −0.23634 | 0.007623 | 23,901,245 | A | G | 1286 |
| rs35775107 | 3.68E−03 | 0.347709 | 0.99338 | 22,771,085 | C | T | 1287 |
| chr14: 22820813 | 3.74E−03 | −0.069795 | 0.048153 | 22,820,813 | A | G | 1288 |
| chr14: 22694028 | 3.90E−03 | 0.088602 | 0.071583 | 22,694,028 | A | C | 1289 |
| rs9743907 | 4.12E−03 | −0.065778 | 0.048938 | 22,482,506 | A | G | 1290 |
| chr14: 22480427 | 4.15E−03 | −0.06573 | 0.048968 | 22,480,427 | A | G | 1291 |
| rs9285579 | 4.18E−03 | −0.065668 | 0.049005 | 22,477,575 | A | G | 1292 |
| rs10162421 | 4.19E−03 | 0.065659 | 0.95099 | 22,477,346 | A | G | 1293 |
| rs11849991 | 4.20E−03 | 0.06564 | 0.950979 | 22,476,293 | C | G | 1294 |
| chr14: 22476144 | 4.20E−03 | −0.065633 | 0.049025 | 22,476,144 | A | G | 1295 |
| rs59951568 | 4.25E−03 | 0.065564 | 0.950946 | 22,474,711 | G | T | 1296 |
| rs60947314 | 4.26E−03 | 0.06555 | 0.95094 | 22,474,634 | C | G | 1297 |
| rs10130976 | 4.27E−03 | −0.065543 | 0.049062 | 22,474,546 | A | T | 1298 |
| rs7159893 | 4.30E−03 | 0.065494 | 0.950918 | 22,474,163 | A | G | 1299 |
| chr14: 22502247 | 4.31E−03 | −0.067143 | 0.047766 | 22,502,247 | A | G | 1300 |
| chr14: 22470501 | 4.44E−03 | 0.065303 | 0.950842 | 22,470,501 | A | G | 1301 |
| rs60613561 | 4.45E−03 | −0.065287 | 0.049166 | 22,470,431 | A | C | 1302 |
| rs45536732 | 4.52E−03 | −0.065227 | 0.049194 | 22,459,636 | C | G | 1303 |
| rs73594486 | 4.54E−03 | 0.065196 | 0.950798 | 22,462,719 | C | T | 1304 |
| chr14: 22506209 | 4.55E−03 | −0.06741 | 0.047332 | 22,506,209 | A | C | 1305 |
| rs8011055 | 4.56E−03 | 0.065142 | 0.950777 | 22,451,358 | C | T | 1306 |
| rs73590530 | 4.56E−03 | 0.06514 | 0.950774 | 22,448,211 | C | T | 1307 |
| rs8021269 | 4.56E−03 | −0.065139 | 0.049223 | 22,453,485 | A | G | 1308 |
| rs73590540 | 4.56E−03 | 0.065139 | 0.950776 | 22,453,171 | C | T | 1309 |
| rs11557895 | 4.56E−03 | −0.065138 | 0.049222 | 22,458,071 | A | G | 1310 |
| chr14: 22452324 | 4.57E−03 | −0.065128 | 0.04923 | 22,452,324 | A | G | 1311 |
| chr14: 23785612 | 4.63E−03 | 0.043331 | 0.26805 | 23,785,612 | A | T | 1312 |
| rs17128397 | 4.64E−03 | 0.069004 | 0.952653 | 22,819,722 | A | C | 1313 |
| rs2005133 | 4.64E−03 | 0.067447 | 0.952719 | 22,507,569 | C | T | 1314 |
| chr14: 23018492 | 4.71E−03 | −0.606902 | 0.006103 | 23,018,492 | A | G | 1315 |
| chr14: 22561348 | 4.73E−03 | 0.071283 | 0.954209 | 22,561,348 | G | T | 1316 |
| rs17198715 | 4.89E−03 | 0.05266 | 0.918097 | 21,951,337 | A | C | 1317 |
| rs2231806 | 5.03E−03 | 0.055331 | 0.093569 | 22,898,733 | A | G | 1318 |
| rs10147083 | 5.11E−03 | 0.052484 | 0.918271 | 21,943,219 | A | C | 1319 |
| rs28538737 | 5.14E−03 | −0.052423 | 0.081739 | 21,942,713 | A | G | 1320 |
| rs28733600 | 5.14E−03 | 0.052459 | 0.917972 | 21,943,910 | A | T | 1321 |
| rs1242631 | 5.24E−03 | 0.064561 | 0.950507 | 22,441,620 | C | T | 1322 |
| rs28687681 | 5.29E−03 | −0.052214 | 0.082444 | 21,943,756 | C | G | 1323 |
| rs8014568 | 5.34E−03 | 0.031318 | 0.355439 | 22,913,203 | T | C | 1324 |
| chr14: 23705402 | 5.66E−03 | −0.063006 | 0.245717 | 23,705,402 | G | T | 1325 |
| rs941722 | 5.73E−03 | −0.067125 | 0.046105 | 22,517,978 | A | C | 1326 |
| rs56044156 | 5.96E−03 | 0.233206 | 0.012005 | 22,851,539 | A | G | 1327 |
| chr14: 22136882 | 6.15E−03 | 0.054308 | 0.908278 | 22,136,882 | A | G | 1328 |
| chr14: 23008616 | 6.26E−03 | 0.399831 | 0.993578 | 23,008,616 | C | G | 1329 |
| rs4048584 | 6.33E−03 | 0.053325 | 0.185322 | 23,509,428 | A | G | 1330 |
| rs2118499 | 6.48E−03 | 0.039023 | 0.829657 | 23,235,512 | T | C | 1331 |
| chr14: 22886092 | 6.56E−03 | 0.04428 | 0.354469 | 22,886,092 | G | T | 1332 |
| chr14: 22433946 | 6.57E−03 | −0.064167 | 0.049328 | 22,433,946 | A | G | 1333 |
| chr14: 22719959 | 6.80E−03 | 0.14378 | 0.989148 | 22,719,959 | C | G | 1334 |
| chr14: 22534064 | 6.85E−03 | 0.189526 | 0.991378 | 22,534,064 | C | G | 1335 |
| chr14: 23059444 | 6.90E−03 | 0.051019 | 0.495739 | 23,059,444 | A | G | 1336 |
| rs10149449 | 6.98E−03 | −0.057097 | 0.930073 | 22,910,351 | A | G | 1337 |
| rs1997903 | 7.07E−03 | −0.079799 | 0.039086 | 22,839,197 | A | G | 1338 |
| rs2332155 | 7.39E−03 | 0.189725 | 0.990531 | 23,534,789 | A | G | 1339 |
| chr14: 22749845 | 7.58E−03 | −0.039311 | 0.390277 | 22,749,845 | A | G | 1340 |
| rs10148260 | 7.74E−03 | 0.031658 | 0.761237 | 21,996,162 | A | C | 1341 |
| chr14: 23003012 | 7.94E−03 | 0.061159 | 0.121219 | 23,003,012 | C | T | 1342 |
| chr14: 23655278 | 8.12E−03 | 0.201716 | 0.992658 | 23,655,278 | G | T | 1343 |
| chr14: 23667214 | 8.12E−03 | 0.407006 | 0.996219 | 23,667,214 | A | G | 1344 |
| rs4982751 | 8.15E−03 | −0.031185 | 0.401469 | 22,875,004 | C | T | 1345 |
| chr14: 22819803 | 8.16E−03 | −0.094432 | 0.086725 | 22,819,803 | A | T | 1346 |
| chr14: 23510084 | 8.43E−03 | 0.183548 | 0.990232 | 23,510,084 | A | G | 1347 |
| rs1805061 | 8.58E−03 | 0.110598 | 0.867628 | 22,317,952 | A | G | 1348 |
| rs17794083 | 8.63E−03 | −0.035902 | 0.173995 | 21,996,759 | A | C | 1349 |
| rs221697 | 8.92E−03 | 0.05995 | 0.950283 | 23,209,497 | A | G | 1350 |
| rs221698 | 8.92E−03 | −0.059982 | 0.049691 | 23,207,946 | A | G | 1351 |
| rs221700 | 8.92E−03 | −0.060032 | 0.049652 | 23,205,823 | A | G | 1352 |
| rs221701 | 8.92E−03 | −0.060055 | 0.049633 | 23,205,675 | G | T | 1353 |
| rs221694 | 8.97E−03 | −0.060481 | 0.049278 | 23,216,565 | A | G | 1354 |
| rs221703 | 9.02E−03 | −0.061722 | 0.048304 | 23,204,385 | A | T | 1355 |
| rs221691 | 9.06E−03 | 0.060422 | 0.950718 | 23,220,495 | G | T | 1356 |
| rs221690 | 9.07E−03 | −0.060412 | 0.049283 | 23,220,862 | A | T | 1357 |
| chr14: 23493423 | 9.09E−03 | −0.18018 | 0.010131 | 23,493,423 | C | T | 1358 |
| rs2577695 | 9.11E−03 | 0.060381 | 0.950714 | 23,221,610 | A | G | 1359 |
| rs8022177 | 9.35E−03 | 0.064516 | 0.955576 | 22,543,546 | C | T | 1360 |
| rs221689 | 9.42E−03 | 0.060167 | 0.950699 | 23,223,883 | C | T | 1361 |
| chr14: 22543249 | 9.46E−03 | −0.064417 | 0.04457 | 22,543,249 | G | T | 1362 |
| rs1956955 | 9.53E−03 | −0.042886 | 0.8537 | 22,997,768 | A | T | 1363 |

Shown is marker identity, p-value of the association, magnitude of effect (in units of fractions of standard deviations), frequency of effect allele, position in NCBI Build 36, identity of effect allele, identity of other allele, SEQ ID for the marker. It should be noted that a positive value for an effect represents an increase in heart rate conferred by the effect allele, while a negative value for the effect represents a decrease (i.e. the allele correlated with the negative effect is predictive of a decreased heart rate).

TABLE 22
Association results for PR interval in a 2 Mb
region flanking rs7660702 on chromosome 4.

| | | | | | eff | other | Seq ID |
|---|---|---|---|---|---|---|---|
| marker | p-value | effect | freq | position | all | all | NO: |
| rs13105921 | 7.32971E−09 | 0.073838 | 0.707288 | 86,918,750 | A | C | 106 |
| rs13137008 | 2.3531E−08 | −0.071958 | 0.270268 | 86,893,223 | G | T | 88 |
| rs17010812 | 2.80668E−08 | 0.071513 | 0.726925 | 86,907,441 | C | T | 323 |
| rs17010816 | 2.80746E−08 | −0.071521 | 0.273056 | 86,908,395 | A | C | 324 |
| rs7660252 | 2.81432E−08 | −0.071589 | 0.272898 | 86,909,580 | A | G | 325 |
| rs34422670 | 2.82073E−08 | 0.071643 | 0.727249 | 86,910,056 | A | G | 326 |
| rs2869384 | 2.82589E−08 | 0.071495 | 0.726849 | 86,905,788 | C | T | 327 |
| rs17010847 | 2.85086E−08 | −0.071869 | 0.272174 | 86,914,002 | A | G | 328 |
| rs34949750 | 2.88148E−08 | −0.071125 | 0.274281 | 86,903,197 | A | G | 329 |
| rs11736641 | 2.88333E−08 | 0.071117 | 0.725697 | 86,902,753 | G | T | 94 |
| rs13111662 | 2.88589E−08 | −0.071107 | 0.274334 | 86,902,145 | C | T | 92 |
| rs13111293 | 2.88654E−08 | −0.071104 | 0.274341 | 86,901,992 | C | T | 330 |
| rs13112030 | 3.44218E−08 | 0.072761 | 0.742552 | 86,893,164 | A | T | 331 |
| rs11724267 | 3.50834E−08 | 0.071154 | 0.735301 | 86,896,100 | A | G | 332 |
| rs17010755 | 3.70241E−08 | 0.070955 | 0.735277 | 86,891,118 | C | G | 333 |
| rs13113783 | 3.74657E−08 | −0.070914 | 0.264759 | 86,889,899 | C | T | 334 |
| rs10012090 | 3.74818E−08 | −0.070923 | 0.267915 | 86,857,950 | A | G | 63 |
| rs7660702 | 3.77122E−08 | 0.070732 | 0.734626 | 86,870,488 | T | C | 72 |
| rs28490560 | 3.86083E−08 | −0.070817 | 0.264827 | 86,887,076 | C | T | 335 |
| rs10516755 | 3.95077E−08 | 0.070744 | 0.735131 | 86,885,065 | C | T | 83 |
| rs2601855 | 4.00195E−08 | −0.070704 | 0.264892 | 86,883,964 | A | T | 80 |
| rs343849 | 4.09287E−08 | −0.070632 | 0.26493 | 86,882,079 | A | T | 78 |
| rs13150566 | 4.09565E−08 | 0.07052 | 0.695445 | 86,887,697 | A | G | 336 |
| rs7692808 | 4.15085E−08 | −0.072436 | 0.256663 | 86,860,173 | A | G | 65 |
| rs35361328 | 4.17298E−08 | 0.070539 | 0.734853 | 86,858,670 | A | C | 337 |
| rs2198328 | 4.20516E−08 | 0.07054 | 0.735018 | 86,879,268 | A | C | 338 |
| rs994285 | 4.22739E−08 | 0.070518 | 0.735002 | 86,878,138 | G | T | 76 |
| rs7658797 | 4.24369E−08 | −0.070481 | 0.26511 | 86,861,738 | A | C | 66 |
| rs2624021 | 4.26365E−08 | −0.070481 | 0.265022 | 86,876,444 | A | T | 339 |
| rs11937419 | 4.31269E−08 | 0.070432 | 0.734949 | 86,874,379 | C | T | 340 |
| rs6813799 | 4.3233E−08 | −0.070421 | 0.265057 | 86,873,960 | A | G | 341 |
| rs4507354 | 4.32708E−08 | 0.070417 | 0.734941 | 86,873,813 | C | G | 342 |
| rs4302455 | 4.33438E−08 | −0.07041 | 0.265063 | 86,873,532 | C | G | 343 |
| rs343860 | 4.33489E−08 | 0.070406 | 0.734931 | 86,863,360 | C | T | 68 |
| rs2869380 | 4.3352E−08 | −0.070409 | 0.265064 | 86,873,501 | A | G | 344 |
| rs2601861 | 4.33838E−08 | −0.07041 | 0.265069 | 86,873,687 | C | T | 345 |
| rs2869379 | 4.33953E−08 | −0.070405 | 0.265066 | 86,873,336 | G | T | 346 |
| rs343856 | 4.36698E−08 | 0.07038 | 0.734954 | 86,866,681 | G | T | 347 |
| rs1482093 | 4.36954E−08 | 0.070376 | 0.734925 | 86,872,160 | C | T | 348 |
| rs13127274 | 4.36961E−08 | −0.07038 | 0.265069 | 86,867,032 | A | G | 349 |
| rs13102580 | 4.3712E−08 | −0.070376 | 0.265046 | 86,867,122 | G | T | 350 |
| rs2869377 | 4.37492E−08 | −0.070372 | 0.26507 | 86,871,884 | A | G | 351 |
| rs2062097 | 4.38607E−08 | −0.070364 | 0.26506 | 86,871,330 | A | G | 352 |
| rs2062098 | 4.38726E−08 | 0.070363 | 0.734941 | 86,871,272 | C | T | 73 |
| rs1482094 | 4.38972E−08 | 0.070362 | 0.734955 | 86,869,043 | C | T | 70 |
| rs7677114 | 4.39885E−08 | 0.070358 | 0.734916 | 86,870,104 | A | T | 353 |
| rs2601860 | 2.50335E−07 | −0.069567 | 0.227477 | 86,876,210 | A | G | 354 |
| rs41527748 | 2.66346E−07 | −0.069368 | 0.227498 | 86,867,769 | A | G | 355 |
| rs67115123 | 1.63866E−06 | −0.068387 | 0.25417 | 86,871,206 | C | G | 356 |
| rs6849659 | 8.94649E−06 | 0.066383 | 0.813789 | 86,829,480 | A | G | 39 |
| rs34587524 | 1.06659E−05 | 0.065673 | 0.809343 | 86,829,889 | G | T | 357 |
| rs7655100 | 1.29412E−05 | 0.05296 | 0.676096 | 86,839,892 | A | T | 45 |
| rs900205 | 1.30707E−05 | −0.052842 | 0.323961 | 86,853,373 | A | G | 358 |
| rs1482085 | 1.30772E−05 | −0.052833 | 0.323957 | 86,849,536 | A | G | 55 |
| rs28505541 | 1.31964E−05 | 0.052821 | 0.675899 | 86,852,811 | C | T | 359 |
| rs28897130 | 1.32575E−05 | −0.07018 | 0.168685 | 86,828,022 | C | T | 360 |
| chr4: 86830387 | 1.42738E−05 | −0.053453 | 0.322626 | 86,830,387 | G | T | 361 |
| rs343854 | 2.82231E−05 | −0.052635 | 0.318988 | 86,873,178 | A | G | 362 |
| rs6531851 | 2.91995E−05 | 0.062505 | 0.809411 | 86,830,922 | A | G | 363 |
| rs11732231 | 4.06784E−05 | 0.05228 | 0.663288 | 86,902,584 | C | G | 93 |
| rs900203 | 4.51054E−05 | 0.051237 | 0.708374 | 86,853,445 | A | T | 364 |
| rs12510813 | 4.83536E−05 | 0.061137 | 0.82462 | 86,892,745 | A | G | 86 |
| rs13135703 | 4.84749E−05 | −0.061128 | 0.175363 | 86,892,681 | A | G | 365 |
| rs13110485 | 4.87995E−05 | −0.061102 | 0.175318 | 86,892,511 | C | T | 366 |
| rs34322771 | 5.04952E−05 | 0.060971 | 0.824907 | 86,891,649 | C | T | 367 |
| rs13121597 | 5.19506E−05 | −0.060859 | 0.174907 | 86,890,942 | A | G | 368 |
| rs9998523 | 5.32615E−05 | 0.06076 | 0.825253 | 86,890,329 | A | C | 369 |
| rs35341700 | 5.74296E−05 | 0.065258 | 0.845169 | 86,876,318 | A | G | 370 |
| rs35577842 | 6.16619E−05 | −0.064978 | 0.154733 | 86,870,664 | A | G | 371 |
| rs55982788 | 7.53301E−05 | 0.068171 | 0.868999 | 86,934,957 | C | G | 372 |
| rs13127367 | 8.31192E−05 | 0.063936 | 0.846892 | 86,867,257 | C | G | 373 |
| rs17010851 | 8.48907E−05 | 0.063606 | 0.853142 | 86,914,746 | A | T | 103 |
| rs4693736 | 8.50581E−05 | −0.063615 | 0.146993 | 86,915,344 | A | G | 105 |
| rs17010857 | 8.50702E−05 | 0.063603 | 0.853071 | 86,915,002 | G | T | 104 |
| chr4: 86910872 | 8.71709E−05 | 0.063353 | 0.853157 | 86,910,872 | A | G | 374 |
| rs11945319 | 8.74164E−05 | −0.063325 | 0.146833 | 86,910,619 | A | G | 100 |
| rs12498959 | 8.80655E−05 | −0.063246 | 0.146785 | 86,910,076 | A | T | 375 |
| chr4: 86909574 | 8.88077E−05 | −0.063162 | 0.146766 | 86,909,574 | A | G | 376 |
| rs1966862 | 8.98007E−05 | 0.063051 | 0.853259 | 86,907,085 | A | G | 97 |
| rs12508919 | 9.00482E−05 | −0.063094 | 0.146605 | 86,905,200 | C | T | 377 |
| rs11097071 | 9.09805E−05 | 0.063221 | 0.853831 | 86,904,360 | A | T | 95 |
| rs17010863 | 9.24387E−05 | −0.064429 | 0.143781 | 86,917,329 | A | G | 378 |
| rs17010925 | 9.92671E−05 | −0.066805 | 0.131647 | 86,932,148 | G | T | 118 |
| rs28491994 | 0.000106357 | −0.066578 | 0.131986 | 86,936,477 | C | T | 379 |
| rs12507198 | 0.000132982 | 0.063111 | 0.859816 | 86,901,712 | G | T | 91 |
| rs13106553 | 0.000153797 | −0.062586 | 0.139605 | 86,888,786 | A | G | 85 |
| rs4693735 | 0.000155414 | −0.062547 | 0.138754 | 86,896,131 | C | T | 90 |
| rs4693127 | 0.000156325 | −0.062524 | 0.138704 | 86,895,937 | A | G | 380 |
| chr4: 86917409 | 0.000183645 | 0.063505 | 0.861236 | 86,917,409 | C | T | 381 |
| rs4693734 | 0.000214819 | −0.061178 | 0.136727 | 86,883,707 | A | T | 382 |
| rs2004613 | 0.000215469 | −0.061167 | 0.136721 | 86,883,411 | C | T | 383 |
| rs3889735 | 0.000216691 | −0.061145 | 0.13671 | 86,882,860 | C | T | 79 |
| rs13139248 | 0.000220221 | 0.061083 | 0.863321 | 86,881,304 | C | G | 384 |
| rs13137575 | 0.000222186 | 0.061048 | 0.863338 | 86,880,459 | C | T | 385 |
| rs35472747 | 0.000223797 | 0.061019 | 0.863352 | 86,879,770 | C | T | 386 |
| rs12510148 | 0.000224423 | −0.061008 | 0.136642 | 86,879,503 | A | G | 387 |
| rs13136153 | 0.000231323 | −0.060885 | 0.136583 | 86,876,657 | C | T | 388 |
| rs12505724 | 0.00023429 | −0.060832 | 0.136558 | 86,875,484 | C | G | 389 |
| rs6813860 | 0.000237749 | 0.06077 | 0.863469 | 86,874,152 | C | G | 75 |
| rs58146546 | 0.000249228 | 0.060567 | 0.863545 | 86,870,232 | A | T | 390 |
| rs34820504 | 0.000249231 | −0.060567 | 0.136455 | 86,870,223 | A | G | 391 |
| rs7676486 | 0.00024946 | 0.060564 | 0.863546 | 86,869,655 | C | T | 71 |
| rs13108523 | 0.000250355 | −0.060554 | 0.136452 | 86,867,448 | C | T | 69 |
| rs13102863 | 0.000250421 | −0.060553 | 0.136451 | 86,867,285 | C | T | 392 |
| rs1014642 | 0.000251049 | −0.060545 | 0.13645 | 86,865,746 | A | T | 393 |
| rs12506038 | 0.000256847 | −0.060474 | 0.136434 | 86,861,445 | C | T | 394 |
| rs34056429 | 0.000259003 | 0.060447 | 0.863572 | 86,859,867 | C | T | 395 |
| rs71599423 | 0.000260222 | −0.060431 | 0.136425 | 86,858,180 | A | G | 396 |
| rs2101134 | 0.000355029 | 0.043757 | 0.647354 | 86,831,373 | A | G | 40 |
| rs11729287 | 0.000397963 | 0.053635 | 0.828631 | 86,945,849 | C | T | 397 |
| rs12507272 | 0.000406317 | −0.054782 | 0.181383 | 86,892,912 | C | T | 87 |
| chr4: 86710577 | 0.000447393 | 0.057989 | 0.411596 | 86,710,577 | C | T | 398 |
| rs7675429 | 0.000459244 | −0.052048 | 0.179097 | 86,940,109 | A | C | 120 |
| rs7689056 | 0.000473781 | −0.0519 | 0.179048 | 86,942,197 | A | G | 121 |
| rs7693640 | 0.000475265 | 0.051885 | 0.820957 | 86,942,405 | C | T | 122 |
| rs12511071 | 0.000505434 | −0.082081 | 0.064358 | 87,427,733 | A | C | 399 |
| rs1116117 | 0.000507908 | −0.043143 | 0.354438 | 86,829,025 | A | T | 400 |
| rs343852 | 0.000552915 | −0.066724 | 0.106658 | 86,880,423 | G | T | 401 |
| rs17010697 | 0.000557081 | 0.05824 | 0.871186 | 86,862,179 | A | C | 67 |
| chr4: 86886221 | 0.000559403 | 0.062422 | 0.724383 | 86,886,221 | A | T | 402 |
| rs343848 | 0.000569142 | −0.060241 | 0.123554 | 86,882,270 | A | C | 403 |
| rs41477846 | 0.000570896 | 0.058131 | 0.870967 | 86,863,154 | A | G | 404 |
| rs6531862 | 0.000572009 | 0.05809 | 0.871404 | 86,865,589 | C | T | 405 |
| rs72656252 | 0.000573163 | −0.058099 | 0.128865 | 86,865,028 | C | T | 406 |
| rs1482092 | 0.000592754 | −0.057921 | 0.128586 | 86,872,282 | A | C | 407 |
| rs2624023 | 0.000606069 | 0.057878 | 0.871532 | 86,875,748 | C | T | 408 |
| chr4: 86299715 | 0.000609435 | −0.591028 | 0.005277 | 86,299,715 | A | G | 409 |
| rs1020584 | 0.000625765 | 0.057959 | 0.872008 | 86,888,074 | A | G | 84 |
| rs13128115 | 0.000643615 | 0.05698 | 0.861234 | 86,852,508 | A | T | 60 |
| rs13112493 | 0.000644845 | 0.058604 | 0.873892 | 86,895,103 | A | G | 89 |
| rs72656285 | 0.000647566 | −0.058646 | 0.12595 | 86,895,620 | A | G | 410 |
| rs56989679 | 0.000650887 | −0.057798 | 0.134091 | 86,901,973 | C | T | 411 |
| rs6819529 | 0.000659015 | −0.05879 | 0.125363 | 86,897,550 | A | C | 412 |
| chr4: 86168511 | 0.000677591 | 0.584913 | 0.994936 | 86,168,511 | A | G | 413 |
| chr4: 86840597 | 0.000696875 | 0.052657 | 0.743203 | 86,840,597 | A | G | 414 |
| rs72656294 | 0.000707487 | −0.05788 | 0.132396 | 86,903,665 | G | T | 415 |
| chr4: 85904875 | 0.000747281 | 0.573762 | 0.99509 | 85,904,875 | A | G | 416 |
| rs17010599 | 0.000898739 | −0.065803 | 0.091057 | 86,838,704 | G | T | 44 |
| rs12646641 | 0.000901366 | −0.065591 | 0.091246 | 86,847,010 | A | G | 417 |
| rs11731040 | 0.000902874 | 0.06572 | 0.908744 | 86,841,367 | C | T | 50 |
| rs1811576 | 0.000914764 | −0.071004 | 0.089246 | 86,825,759 | A | G | 418 |
| rs4585295 | 0.000930373 | −0.054204 | 0.143526 | 86,844,610 | C | T | 419 |
| chr4: 86878564 | 0.000939511 | −0.061557 | 0.118297 | 86,878,564 | C | T | 420 |
| chr4: 86843230 | 0.000965887 | −0.065372 | 0.093553 | 86,843,230 | A | G | 421 |
| rs12648692 | 0.00101017 | 0.065151 | 0.905396 | 86,837,105 | A | G | 42 |
| rs7674888 | 0.00110772 | −0.056608 | 0.126541 | 86,904,770 | A | G | 96 |
| rs11097072 | 0.00112591 | −0.056535 | 0.126374 | 86,906,707 | A | T | 422 |
| rs12054628 | 0.00113006 | −0.056526 | 0.126326 | 86,907,793 | A | T | 98 |
| rs11097073 | 0.00113346 | −0.056555 | 0.126231 | 86,909,260 | C | T | 423 |
| rs6831420 | 0.00115842 | −0.056757 | 0.125566 | 86,911,689 | A | G | 101 |
| rs7680588 | 0.00116462 | 0.056804 | 0.874593 | 86,912,777 | C | T | 102 |
| rs11097074 | 0.00117245 | −0.056861 | 0.125211 | 86,915,644 | C | T | 424 |
| chr4: 86505218 | 0.00117643 | −0.593205 | 0.005878 | 86,505,218 | A | T | 425 |
| chr4: 86978387 | 0.00125428 | −0.060538 | 0.214821 | 86,978,387 | G | T | 426 |
| rs12650494 | 0.0012805 | 0.063461 | 0.90868 | 86,856,334 | C | T | 62 |
| rs1031987 | 0.0013415 | 0.072707 | 0.925265 | 86,858,565 | C | T | 427 |
| rs17011540 | 0.00135173 | −0.057466 | 0.109479 | 87,369,493 | G | T | 428 |
| rs1482091 | 0.00138704 | −0.063065 | 0.090711 | 86,872,385 | T | C | 74 |
| rs7434773 | 0.00141055 | −0.051717 | 0.145763 | 86,836,580 | A | G | 429 |
| rs4413396 | 0.00143172 | −0.050768 | 0.148201 | 86,851,795 | A | G | 57 |
| rs11735639 | 0.00143175 | −0.050769 | 0.148199 | 86,850,942 | G | T | 56 |
| rs36095037 | 0.0014318 | 0.050771 | 0.851806 | 86,849,510 | C | T | 430 |
| rs1871864 | 0.00143184 | 0.050773 | 0.85181 | 86,848,126 | A | T | 53 |
| rs1482084 | 0.00143186 | 0.050774 | 0.851811 | 86,847,677 | A | G | 431 |
| rs4488930 | 0.00143195 | 0.050778 | 0.851819 | 86,845,208 | C | T | 432 |
| rs13146939 | 0.00143197 | 0.050767 | 0.851799 | 86,852,284 | A | G | 58 |
| rs17010632 | 0.001432 | 0.05078 | 0.851824 | 86,844,920 | A | G | 52 |
| rs13152150 | 0.00143224 | 0.050766 | 0.851799 | 86,852,331 | A | G | 59 |
| rs12513384 | 0.00143278 | 0.050814 | 0.85189 | 86,843,716 | C | T | 433 |
| rs931195 | 0.00143381 | 0.050856 | 0.851976 | 86,843,465 | A | G | 51 |
| rs876107 | 0.0014339 | −0.05086 | 0.148017 | 86,842,332 | A | G | 434 |
| rs1110777 | 0.0014339 | 0.05086 | 0.851982 | 86,842,397 | A | G | 435 |
| rs7439720 | 0.00143414 | 0.050867 | 0.851998 | 86,840,878 | A | G | 48 |
| rs10033273 | 0.00143561 | −0.050904 | 0.14792 | 86,840,097 | A | C | 47 |
| rs7677064 | 0.00143566 | −0.050905 | 0.147917 | 86,839,908 | C | T | 46 |
| rs6531854 | 0.00143586 | −0.05091 | 0.147906 | 86,838,681 | C | T | 436 |
| rs6830971 | 0.00143756 | 0.050511 | 0.779208 | 86,823,896 | A | G | 437 |
| rs6531897 | 0.00143779 | 0.059874 | 0.159415 | 87,251,718 | A | G | 438 |
| rs10007242 | 0.00144145 | 0.05104 | 0.852386 | 86,835,195 | A | T | 439 |
| rs10017047 | 0.0014436 | −0.051096 | 0.147493 | 86,834,415 | A | G | 41 |
| rs2101135 | 0.00145472 | −0.051305 | 0.146997 | 86,831,412 | A | T | 440 |
| rs6531852 | 0.00145669 | 0.051038 | 0.852429 | 86,834,645 | A | C | 441 |
| chr4: 86860735 | 0.00149194 | −0.062481 | 0.091104 | 86,860,735 | C | T | 442 |
| rs6845071 | 0.00151325 | −0.05208 | 0.145045 | 86,829,316 | A | G | 443 |
| chr4: 86925126 | 0.00153117 | 0.055799 | 0.740299 | 86,925,126 | A | C | 444 |
| rs6842671 | 0.0015338 | 0.072184 | 0.070328 | 87,473,202 | C | G | 445 |
| chr4: 87485450 | 0.00154596 | 0.072132 | 0.070325 | 87,485,450 | C | G | 446 |
| rs28791572 | 0.00162583 | −0.056809 | 0.106656 | 87,378,508 | G | T | 447 |
| rs28870188 | 0.00163999 | −0.056788 | 0.106738 | 87,309,151 | A | C | 448 |
| rs7697134 | 0.00165162 | 0.061822 | 0.908957 | 86,866,099 | A | C | 449 |
| chr4: 86867589 | 0.00166677 | −0.061763 | 0.091041 | 86,867,589 | A | G | 450 |
| rs1482095 | 0.00168212 | −0.061706 | 0.09108 | 86,868,956 | A | G | 451 |
| rs6853196 | 0.00168258 | −0.061707 | 0.091109 | 86,868,909 | C | T | 452 |
| rs12647014 | 0.00169927 | 0.062248 | 0.90982 | 86,889,710 | A | G | 453 |
| rs4455406 | 0.0016995 | −0.062045 | 0.09048 | 86,887,976 | A | T | 454 |
| rs7682971 | 0.00169998 | −0.061936 | 0.090623 | 86,884,320 | C | T | 82 |
| rs11722392 | 0.00170011 | 0.061912 | 0.909346 | 86,883,521 | C | T | 455 |
| rs7661884 | 0.00170065 | 0.061816 | 0.90922 | 86,880,315 | A | C | 456 |
| rs57065351 | 0.00170169 | 0.062561 | 0.910315 | 86,891,407 | A | C | 457 |
| rs7685320 | 0.00170172 | −0.061793 | 0.090806 | 86,879,524 | C | T | 458 |
| rs6531863 | 0.00170313 | −0.061767 | 0.090836 | 86,878,621 | C | T | 459 |
| chr4: 86876836 | 0.00170595 | 0.061714 | 0.909106 | 86,876,836 | A | G | 460 |
| rs6839040 | 0.00170736 | 0.061688 | 0.909077 | 86,875,944 | A | G | 461 |
| rs12644984 | 0.0017085 | −0.061667 | 0.090946 | 86,875,230 | C | G | 462 |
| rs13107701 | 0.00171491 | 0.052136 | 0.861651 | 86,947,171 | C | T | 463 |
| rs36104548 | 0.00175186 | −0.051592 | 0.140881 | 86,948,615 | G | T | 464 |
| chr4: 86899196 | 0.00176532 | −0.063727 | 0.087382 | 86,899,196 | C | T | 465 |
| rs7675688 | 0.00176739 | 0.063744 | 0.912662 | 86,899,342 | C | G | 466 |
| chr4: 86899554 | 0.00177047 | 0.063769 | 0.912725 | 86,899,554 | A | T | 467 |
| rs11733669 | 0.00177193 | −0.052086 | 0.136291 | 86,945,753 | C | T | 468 |
| rs7686507 | 0.00182477 | 0.092137 | 0.958845 | 86,859,200 | C | T | 469 |
| rs35201853 | 0.00183721 | −0.091845 | 0.041284 | 86,857,328 | A | C | 470 |
| chr4: 87619908 | 0.00187452 | 0.201429 | 0.008297 | 87,619,908 | C | T | 471 |
| rs1871865 | 0.00191246 | −0.049085 | 0.156481 | 86,848,557 | C | G | 54 |
| rs2167718 | 0.00191296 | −0.050741 | 0.142897 | 86,951,747 | G | T | 472 |
| chr4: 86895034 | 0.00201238 | −0.318629 | 0.991829 | 86,895,034 | A | C | 473 |
| chr4: 87608123 | 0.00202509 | −0.20084 | 0.991806 | 87,608,123 | C | T | 474 |
| rs189397 | 0.00202711 | 0.035679 | 0.412464 | 87,069,007 | C | T | 475 |
| rs7699404 | 0.0021147 | 0.034438 | 0.458615 | 86,939,862 | T | C | 476 |
| rs60426074 | 0.00212887 | 0.075455 | 0.93114 | 86,830,412 | C | T | 477 |
| rs6815441 | 0.00217148 | −0.051698 | 0.13714 | 86,949,538 | T | C | 478 |
| chr4: 87629257 | 0.00238127 | 0.066462 | 0.074589 | 87,629,257 | A | C | 479 |
| rs34868396 | 0.00238845 | 0.09639 | 0.959179 | 86,830,386 | C | T | 480 |
| chr4: 87707600 | 0.00244825 | 0.066201 | 0.074681 | 87,707,600 | C | T | 481 |
| chr4: 87574965 | 0.00253969 | 0.091751 | 0.038228 | 87,574,965 | C | G | 482 |
| chr4: 87772826 | 0.00265726 | −0.065552 | 0.924794 | 87,772,826 | C | T | 483 |
| rs7666211 | 0.00302491 | −0.047735 | 0.155106 | 86,846,755 | C | T | 484 |
| rs13123125 | 0.00313846 | 0.060151 | 0.910974 | 86,908,641 | C | T | 485 |
| rs17010839 | 0.00317337 | −0.060349 | 0.088654 | 86,910,281 | G | T | 99 |
| rs73834264 | 0.00326877 | 0.191644 | 0.00822 | 87,434,185 | C | T | 486 |
| rs62305526 | 0.0035209 | 0.06086 | 0.134415 | 87,275,021 | A | G | 487 |
| rs4693126 | 0.00359942 | −0.057115 | 0.111692 | 86,895,823 | G | T | 488 |
| rs6855390 | 0.00371043 | 0.067536 | 0.917963 | 86,873,236 | A | C | 489 |
| chr4: 87413305 | 0.00397503 | 0.187463 | 0.008 | 87,413,305 | A | G | 490 |
| chr4: 87407757 | 0.00424805 | 0.186387 | 0.007973 | 87,407,757 | A | C | 491 |
| chr4: 87485357 | 0.00440884 | 0.19031 | 0.007921 | 87,485,357 | A | G | 492 |
| rs7439226 | 0.00482897 | −0.113617 | 0.021597 | 86,526,830 | A | G | 493 |
| chr4: 86789212 | 0.00486636 | 0.101734 | 0.949574 | 86,789,212 | G | T | 494 |
| rs12499867 | 0.00492277 | 0.036739 | 0.687759 | 86,919,587 | C | T | 495 |
| chr4: 86852629 | 0.00495728 | −0.167604 | 0.013774 | 86,852,629 | A | C | 496 |
| rs6531908 | 0.00514753 | −0.034536 | 0.340328 | 87,395,339 | G | T | 497 |
| chr4: 86280463 | 0.00531648 | 0.423296 | 0.993146 | 86,280,463 | C | G | 498 |
| rs11726269 | 0.00535877 | −0.080875 | 0.949985 | 87,452,008 | A | G | 499 |
| chr4: 86641656 | 0.00550462 | 0.072723 | 0.073355 | 86,641,656 | G | T | 500 |
| chr4: 86467844 | 0.00602276 | 0.106597 | 0.977124 | 86,467,844 | C | T | 501 |
| chr4: 86793655 | 0.00628914 | 0.061555 | 0.882233 | 86,793,655 | A | T | 502 |
| rs13147689 | 0.00633548 | 0.040186 | 0.806705 | 86,839,564 | C | T | 503 |
| rs72656271 | 0.00639039 | −0.063427 | 0.892981 | 86,882,960 | A | T | 504 |
| chr4: 87114168 | 0.00639719 | 0.133279 | 0.978079 | 87,114,168 | C | T | 505 |
| rs13110928 | 0.00641402 | 0.046265 | 0.840253 | 86,864,521 | A | G | 506 |
| rs900204 | 0.00649366 | −0.04013 | 0.196321 | 86,841,290 | A | G | 49 |
| chr4: 86779965 | 0.00655558 | −0.103013 | 0.963003 | 86,779,965 | C | T | 507 |
| chr4: 86925138 | 0.00670509 | −0.152861 | 0.956976 | 86,925,138 | C | G | 508 |
| chr4: 86610824 | 0.00681298 | −0.124018 | 0.980054 | 86,610,824 | C | T | 509 |
| rs13125320 | 0.00681693 | 0.031897 | 0.452012 | 86,917,411 | C | T | 510 |
| rs2126021 | 0.00707073 | −0.092261 | 0.969344 | 87,339,787 | A | G | 511 |
| rs1460762 | 0.00714074 | 0.092287 | 0.030753 | 87,316,997 | A | G | 512 |
| chr4: 87563777 | 0.00720514 | 0.127254 | 0.01506 | 87,563,777 | A | G | 513 |
| rs343847 | 0.00751356 | 0.030177 | 0.424237 | 86,882,283 | A | C | 514 |
| chr4: 87348930 | 0.00762078 | −0.074873 | 0.042397 | 87,348,930 | A | G | 515 |
| chr4: 87309739 | 0.00767551 | 0.074872 | 0.957633 | 87,309,739 | C | T | 516 |
| chr4: 87035189 | 0.00769285 | 0.049587 | 0.820573 | 87,035,189 | A | C | 517 |
| chr4: 87559726 | 0.00771327 | −0.12585 | 0.984077 | 87,559,726 | C | T | 518 |
| rs7696763 | 0.00790151 | 0.045816 | 0.123989 | 87,048,553 | A | G | 519 |
| chr4: 87609737 | 0.00800871 | 0.181388 | 0.007542 | 87,609,737 | C | T | 520 |
| chr4: 87287406 | 0.00801144 | −0.074855 | 0.04769 | 87,287,406 | C | G | 521 |
| chr4: 87367662 | 0.00818169 | −0.059243 | 0.079545 | 87,367,662 | A | T | 522 |
| rs6827405 | 0.00818691 | −0.034783 | 0.235024 | 87,308,668 | C | T | 523 |
| rs67712948 | 0.00834173 | −0.034246 | 0.262558 | 87,345,843 | A | C | 524 |
| rs17011564 | 0.00848628 | −0.034238 | 0.241401 | 87,372,467 | C | G | 525 |
| rs17400759 | 0.0086636 | −0.033168 | 0.721823 | 86,979,041 | C | G | 526 |
| chr4: 87749368 | 0.00869834 | 0.179658 | 0.007414 | 87,749,368 | A | G | 527 |
| chr4: 87661852 | 0.00872399 | 0.179605 | 0.007416 | 87,661,852 | C | T | 528 |
| chr4: 86735324 | 0.00918611 | 0.147986 | 0.979127 | 86,735,324 | A | G | 529 |
| rs28896887 | 0.00923726 | 0.04068 | 0.84515 | 87,341,205 | A | G | 530 |
| rs66544335 | 0.00943407 | −0.033713 | 0.265842 | 87,345,890 | G | T | 531 |
| chr4: 87284496 | 0.00944825 | −0.093322 | 0.968736 | 87,284,496 | A | G | 532 |
| chr4: 87075373 | 0.00960776 | −0.131898 | 0.019991 | 87,075,373 | A | G | 533 |
| chr4: 87230422 | 0.00972013 | −0.233391 | 0.007177 | 87,230,422 | A | G | 534 |
| chr4: 87229705 | 0.00980706 | −0.22976 | 0.00726 | 87,229,705 | A | T | 535 |

Shown is marker identity, p-value of the association, magnitude of effect (in units of fractions of standard deviations), frequency of effect allele, position in NCBI Build 36, identity of effect allele, identity of other allele, SEQ ID for the marker. It should be noted that a positive value for an effect represents predicted increase in the interval conferred by the effect allele, while a negative value for the effect represents a decrease (i.e. the allele correlated with the negative effect is predictive of a decreased value of the measure).

TABLE 23
Association results for QRS interval in a 2
Mb region flanking rs1321311 on chromosome 6.

| | | | | | effect | other | SEQ ID |
|---|---|---|---|---|---|---|---|
| marker | P-value | effect | freq | position | allele | allele | NO: |
| rs4151702 | 3.45E−08 | 0.087491 | 0.157695 | 36,753,966 | C | G | 808 |
| rs730506 | 3.48E−08 | 0.08747 | 0.157761 | 36,753,946 | C | G | 809 |
| rs12199346 | 3.63E−08 | 0.07448 | 0.217378 | 36,749,524 | A | C | 810 |
| rs3176326 | 5.61E−08 | 0.086528 | 0.158602 | 36,755,267 | A | G | 811 |
| rs66761782 | 7.74E−08 | 0.072326 | 0.211639 | 36,744,058 | C | T | 812 |
| rs7742159 | 8.46E−08 | −0.072401 | 0.792124 | 36,727,430 | A | C | 813 |
| rs9470358 | 8.48E−08 | 0.072374 | 0.207876 | 36,728,480 | A | G | 814 |
| rs9918353 | 8.49E−08 | −0.072286 | 0.792087 | 36,730,655 | A | C | 815 |
| rs1321311 | 8.51E−08 | 0.072246 | 0.207922 | 36,730,878 | A | C | 127 |
| rs1321310 | 8.74E−08 | 0.071815 | 0.21096 | 36,731,102 | C | T | 128 |
| rs9470361 | 8.75E−08 | 0.071814 | 0.210961 | 36,731,357 | A | G | 130 |
| rs9462210 | 8.75E−08 | 0.071816 | 0.210998 | 36,736,931 | A | G | 141 |
| rs9462207 | 8.84E−08 | 0.071785 | 0.211002 | 36,735,577 | C | T | 137 |
| rs7756236 | 1.14E−07 | −0.071754 | 0.786852 | 36,735,031 | A | G | 136 |
| rs3176342 | 1.47E−07 | −0.088181 | 0.858994 | 36,757,571 | A | G | 816 |
| rs4331968 | 2.04E−07 | −0.071515 | 0.796717 | 36,731,221 | A | T | 129 |
| rs1321313 | 2.68E−07 | −0.069028 | 0.78164 | 36,726,799 | C | T | 125 |
| rs4711457 | 3.72E−07 | −0.060591 | 0.68523 | 36,741,138 | C | T | 146 |
| rs4711456 | 4.01E−07 | 0.060599 | 0.314693 | 36,740,460 | C | T | 817 |
| rs56100429 | 4.39E−07 | −0.071194 | 0.728779 | 36,724,578 | C | T | 818 |
| rs7774130 | 4.78E−07 | −0.069935 | 0.799231 | 36,731,734 | C | T | 819 |
| rs3176323 | 5.20E−07 | 0.064494 | 0.311257 | 36,754,827 | C | T | 820 |
| rs9470366 | 5.49E−07 | 0.069445 | 0.198528 | 36,733,540 | A | G | 133 |
| rs4713999 | 6.70E−07 | 0.059673 | 0.311916 | 36,741,047 | A | G | 145 |
| rs10807170 | 6.80E−07 | 0.059214 | 0.310456 | 36,737,422 | C | T | 142 |
| rs4713996 | 6.82E−07 | 0.059205 | 0.310473 | 36,737,692 | C | T | 143 |
| rs9394368 | 6.88E−07 | 0.059184 | 0.310498 | 36,738,503 | C | G | 144 |
| rs6930083 | 6.90E−07 | 0.059216 | 0.310657 | 36,742,134 | A | G | 147 |
| chr6: 36743712 | 1.14E−06 | 0.081981 | 0.159842 | 36,743,712 | G | T | 821 |
| rs6937605 | 1.51E−06 | −0.07766 | 0.849948 | 36,767,910 | C | T | 156 |
| rs12207916 | 4.76E−06 | 0.060537 | 0.262669 | 36,725,630 | C | T | 124 |
| rs733590 | 7.31E−06 | 0.053502 | 0.347639 | 36,753,181 | C | T | 150 |
| rs7767246 | 9.13E−06 | −0.067918 | 0.836796 | 36,767,193 | C | G | 155 |
| rs12191972 | 9.47E−06 | 0.068054 | 0.161084 | 36,766,720 | C | T | 154 |
| rs4714001 | 1.17E−05 | −0.05075 | 0.644104 | 36,746,153 | A | G | 148 |
| rs13196885 | 1.78E−05 | 0.047786 | 0.429447 | 36,740,666 | C | T | 822 |
| rs12207548 | 1.92E−05 | 0.066279 | 0.195542 | 36,764,234 | T | C | 153 |
| rs60598739 | 2.51E−05 | −0.057103 | 0.445117 | 37,272,411 | C | T | 823 |
| rs6457933 | 2.79E−05 | 0.047405 | 0.395995 | 36,726,246 | C | T | 824 |
| rs3176320 | 3.39E−05 | −0.050655 | 0.648488 | 36,754,766 | A | G | 825 |
| rs7740181 | 3.47E−05 | −0.048002 | 0.618452 | 36,732,089 | C | T | 826 |
| rs9368950 | 3.48E−05 | 0.045788 | 0.512641 | 36,735,850 | T | C | 138 |
| rs2395655 | 3.80E−05 | −0.048476 | 0.618345 | 36,753,674 | A | G | 151 |
| rs4135240 | 4.25E−05 | 0.049908 | 0.362913 | 36,755,658 | C | T | 827 |
| rs9470367 | 4.95E−05 | −0.044679 | 0.489068 | 36,734,910 | C | G | 135 |
| rs4713994 | 5.00E−05 | −0.04475 | 0.48902 | 36,729,511 | C | T | 126 |
| rs9462209 | 6.04E−05 | −0.044909 | 0.595105 | 36,736,020 | T | G | 140 |
| rs9470363 | 6.06E−05 | 0.04492 | 0.404642 | 36,732,691 | A | G | 828 |
| rs9462208 | 6.11E−05 | 0.044873 | 0.404858 | 36,735,868 | C | T | 139 |
| rs6936993 | 6.11E−05 | 0.044873 | 0.404858 | 36,734,300 | C | T | 134 |
| rs6936598 | 6.11E−05 | 0.044873 | 0.404858 | 36,734,074 | C | T | 829 |
| rs11969445 | 6.11E−05 | 0.044873 | 0.404858 | 36,733,360 | C | T | 132 |
| rs6930671 | 6.11E−05 | 0.044873 | 0.404858 | 36,733,250 | C | T | 131 |
| rs6907793 | 6.11E−05 | −0.044873 | 0.595142 | 36,733,184 | A | G | 830 |
| rs6907437 | 6.11E−05 | −0.044873 | 0.595142 | 36,732,999 | A | G | 831 |
| rs9470362 | 6.11E−05 | 0.044872 | 0.404857 | 36,732,627 | C | T | 832 |
| rs4568449 | 6.18E−05 | −0.044886 | 0.595113 | 36,729,121 | A | G | 833 |
| rs3176334 | 6.73E−05 | 0.048552 | 0.381061 | 36,756,342 | C | T | 834 |
| rs7753169 | 7.47E−05 | −0.052258 | 0.648381 | 36,722,304 | A | C | 835 |
| rs626516 | 8.04E−05 | −0.056717 | 0.791023 | 36,573,358 | A | G | 836 |
| rs3176336 | 9.26E−05 | −0.046128 | 0.602036 | 36,756,794 | A | T | 837 |
| rs9380584 | 1.17E−04 | 0.044982 | 0.49057 | 36,724,676 | C | T | 838 |
| rs1321309 | 1.39E−04 | −0.042256 | 0.524934 | 36,746,614 | A | G | 149 |
| rs3829964 | 1.52E−04 | 0.042475 | 0.467194 | 36,752,476 | C | T | 839 |
| rs762624 | 1.52E−04 | −0.054999 | 0.794736 | 36,753,566 | A | C | 840 |
| chr6: 36699107 | 1.78E−04 | 0.111815 | 0.044907 | 36,699,107 | A | T | 841 |
| chr6: 36699106 | 1.80E−04 | 0.111766 | 0.044942 | 36,699,106 | A | C | 842 |
| rs6457931 | 1.89E−04 | 0.045567 | 0.382831 | 36,721,790 | G | T | 123 |
| chr6: 36729910 | 2.11E−04 | 0.214064 | 0.015748 | 36,729,910 | A | C | 843 |
| chr6: 36605513 | 2.12E−04 | −0.144656 | 0.027308 | 36,605,513 | C | T | 844 |
| chr6: 36554548 | 2.13E−04 | 0.144603 | 0.97272 | 36,554,548 | C | G | 845 |
| rs56361858 | 2.14E−04 | −0.144609 | 0.027269 | 36,555,040 | C | G | 846 |
| chr6: 36570540 | 2.14E−04 | −0.144651 | 0.02725 | 36,570,540 | C | T | 847 |
| chr6: 36601182 | 2.14E−04 | −0.144272 | 0.027374 | 36,601,182 | C | T | 848 |
| rs3176352 | 2.17E−04 | −0.050625 | 0.78123 | 36,760,317 | C | G | 152 |
| chr6: 36559248 | 2.19E−04 | −0.143949 | 0.027685 | 36,559,248 | A | C | 849 |
| rs611831 | 2.23E−04 | 0.110271 | 0.044447 | 36,673,286 | C | G | 850 |
| rs9380583 | 2.24E−04 | −0.044064 | 0.427639 | 36,724,619 | A | G | 851 |
| rs646574 | 2.26E−04 | −0.110021 | 0.9557 | 36,684,612 | C | T | 852 |
| rs9470439 | 2.54E−04 | 0.061285 | 0.813713 | 37,010,617 | C | T | 853 |
| rs4713992 | 2.61E−04 | −0.052038 | 0.624632 | 36,720,183 | A | G | 854 |
| rs11754995 | 3.78E−04 | −0.048344 | 0.383014 | 36,720,301 | A | G | 855 |
| rs12193641 | 4.01E−04 | −0.072645 | 0.098879 | 36,600,748 | A | G | 856 |
| rs1321308 | 4.67E−04 | 0.039336 | 0.490618 | 36,746,669 | A | C | 857 |
| chr6: 36688262 | 4.88E−04 | 0.13279 | 0.032901 | 36,688,262 | A | T | 858 |
| chr6: 36704523 | 5.06E−04 | −0.132482 | 0.967394 | 36,704,523 | C | G | 859 |
| rs72853335 | 5.85E−04 | 0.102879 | 0.045526 | 36,738,987 | A | G | 860 |
| rs10947663 | 6.77E−04 | −0.038716 | 0.570174 | 37,272,580 | A | C | 861 |
| chr6: 36799586 | 7.54E−04 | 0.092462 | 0.050005 | 36,799,586 | C | T | 862 |
| rs3176337 | 9.18E−04 | −0.038083 | 0.458869 | 36,756,898 | A | C | 863 |
| rs7773453 | 1.07E−03 | −0.047549 | 0.806031 | 36,349,747 | G | T | 864 |
| rs73412244 | 1.09E−03 | 0.10759 | 0.044114 | 36,757,272 | C | T | 865 |
| rs12202603 | 1.13E−03 | 0.041699 | 0.236491 | 36,351,472 | G | T | 866 |
| rs9368919 | 1.13E−03 | −0.04182 | 0.76359 | 36,350,268 | A | T | 867 |
| rs12201879 | 1.13E−03 | 0.041887 | 0.236363 | 36,349,589 | A | G | 868 |
| rs35968576 | 1.16E−03 | 0.041627 | 0.236357 | 36,351,618 | C | T | 869 |
| chr6: 37114553 | 1.21E−03 | −0.118402 | 0.027449 | 37,114,553 | A | G | 870 |
| chr6: 37114847 | 1.22E−03 | −0.118631 | 0.026936 | 37,114,847 | A | C | 871 |
| chr6: 36631721 | 1.30E−03 | −0.112457 | 0.040497 | 36,631,721 | A | C | 872 |
| rs12191389 | 1.30E−03 | −0.07331 | 0.082452 | 36,535,800 | A | T | 873 |
| rs62406593 | 1.33E−03 | −0.039736 | 0.714392 | 36,776,141 | C | T | 874 |
| rs12200049 | 1.38E−03 | −0.040447 | 0.695212 | 36,348,819 | C | T | 875 |
| rs58708371 | 1.40E−03 | 0.039528 | 0.28537 | 36,774,363 | A | C | 876 |
| chr6: 36559632 | 1.43E−03 | 0.175604 | 0.981526 | 36,559,632 | C | T | 877 |
| rs1541316 | 1.54E−03 | −0.040693 | 0.764876 | 36,352,961 | G | T | 878 |
| rs72851235 | 1.57E−03 | −0.069714 | 0.0862 | 36,545,075 | A | G | 879 |
| chr6: 36127016 | 1.58E−03 | 0.048539 | 0.742109 | 36,127,016 | A | C | 880 |
| rs736348 | 1.67E−03 | 0.05137 | 0.18588 | 36,859,223 | A | G | 881 |
| rs3734341 | 1.68E−03 | 0.113441 | 0.9685 | 37,083,209 | A | G | 882 |
| rs9368920 | 1.69E−03 | −0.039126 | 0.735616 | 36,350,295 | C | T | 883 |
| rs56285849 | 2.05E−03 | 0.068598 | 0.07624 | 36,812,271 | C | T | 884 |
| chr6: 36184608 | 2.10E−03 | −0.04496 | 0.30025 | 36,184,608 | G | T | 885 |
| rs8180685 | 2.33E−03 | −0.039333 | 0.765769 | 36,355,081 | C | T | 886 |
| rs6923899 | 2.43E−03 | 0.03853 | 0.268786 | 36,778,169 | A | G | 887 |
| rs743851 | 2.45E−03 | −0.038917 | 0.73929 | 36,341,442 | A | G | 888 |
| rs60143683 | 2.50E−03 | −0.039028 | 0.739173 | 36,339,365 | A | G | 889 |
| rs56146544 | 2.57E−03 | −0.041921 | 0.799416 | 36,519,042 | G | T | 890 |
| chr6: 36757163 | 2.79E−03 | −0.044148 | 0.60248 | 36,757,163 | C | T | 891 |
| chr6: 36793359 | 2.79E−03 | 0.05065 | 0.785176 | 36,793,359 | A | G | 892 |
| chr6: 36625084 | 3.08E−03 | −0.059915 | 0.817492 | 36,625,084 | C | T | 893 |
| chr6: 37183956 | 3.11E−03 | −0.0819 | 0.052541 | 37,183,956 | A | C | 894 |
| rs12201679 | 3.23E−03 | −0.045145 | 0.835569 | 36,856,018 | C | T | 895 |
| chr6: 36845486 | 3.27E−03 | −0.104159 | 0.966449 | 36,845,486 | G | T | 896 |
| chr6: 36045139 | 3.28E−03 | −0.235991 | 0.00745 | 36,045,139 | A | G | 897 |
| rs56317508 | 3.38E−03 | 0.034942 | 0.349792 | 36,351,806 | C | T | 898 |
| rs6457942 | 3.43E−03 | −0.033672 | 0.623037 | 36,775,141 | C | T | 899 |
| rs13199306 | 3.64E−03 | −0.04008 | 0.234483 | 37,010,286 | C | T | 900 |
| rs6457940 | 3.64E−03 | 0.035019 | 0.320265 | 36,771,335 | A | C | 901 |
| rs12215712 | 3.67E−03 | 0.053327 | 0.885248 | 36,660,855 | A | T | 902 |
| rs12201085 | 3.72E−03 | −0.065675 | 0.081995 | 36,509,359 | A | G | 903 |
| chr6: 36699733 | 3.84E−03 | −0.052823 | 0.115238 | 36,699,733 | A | C | 904 |
| rs6912891 | 3.90E−03 | 0.032656 | 0.608639 | 36,959,742 | G | T | 905 |
| chr6: 36958508 | 3.91E−03 | −0.035802 | 0.362934 | 36,958,508 | A | G | 906 |
| rs1738455 | 3.92E−03 | 0.035559 | 0.61412 | 37,711,080 | C | T | 907 |
| rs9357229 | 3.98E−03 | 0.032568 | 0.608444 | 36,962,671 | A | G | 908 |
| rs665793 | 4.13E−03 | −0.046889 | 0.856232 | 36,491,935 | A | G | 909 |
| rs62408365 | 4.19E−03 | −0.061763 | 0.076281 | 37,197,366 | A | G | 910 |
| chr6: 36575432 | 4.20E−03 | 0.126755 | 0.023603 | 36,575,432 | C | T | 911 |
| chr6: 37129521 | 4.23E−03 | −0.042587 | 0.310816 | 37,129,521 | G | T | 912 |
| rs10947594 | 4.27E−03 | 0.036543 | 0.280193 | 36,338,556 | A | G | 913 |
| chr6: 36236713 | 4.38E−03 | −0.216018 | 0.008927 | 36,236,713 | C | T | 914 |
| rs6930941 | 4.41E−03 | 0.034145 | 0.336031 | 36,770,679 | C | T | 915 |
| rs11963261 | 4.42E−03 | −0.035361 | 0.281079 | 36,968,944 | C | T | 916 |
| rs12213912 | 4.42E−03 | 0.03534 | 0.719237 | 36,968,070 | C | T | 917 |
| rs7772573 | 4.49E−03 | 0.033905 | 0.313511 | 36,349,212 | A | G | 918 |
| rs1023037 | 4.50E−03 | −0.042185 | 0.161484 | 37,023,932 | A | G | 919 |
| rs2177845 | 4.55E−03 | 0.042156 | 0.838328 | 37,023,072 | C | T | 920 |
| rs1100858 | 4.60E−03 | −0.041493 | 0.177413 | 36,162,372 | A | G | 921 |
| chr6: 36184598 | 4.67E−03 | 0.039168 | 0.411032 | 36,184,598 | A | C | 922 |
| rs236448 | 4.77E−03 | 0.033177 | 0.639691 | 36,811,073 | A | C | 923 |
| rs6903663 | 4.78E−03 | −0.034993 | 0.684929 | 36,338,642 | A | C | 924 |
| rs851025 | 4.81E−03 | 0.044992 | 0.849725 | 36,107,217 | A | G | 925 |
| rs10807171 | 5.11E−03 | −0.033863 | 0.68829 | 36,770,878 | A | G | 926 |
| rs6457938 | 5.14E−03 | −0.033986 | 0.429634 | 36,768,431 | A | G | 927 |
| chr6: 36655330 | 5.17E−03 | 0.050812 | 0.21913 | 36,655,330 | A | G | 928 |
| chr6: 36513839 | 5.19E−03 | 0.043731 | 0.146784 | 36,513,839 | C | T | 929 |
| chr6: 36727927 | 5.33E−03 | −0.090455 | 0.939679 | 36,727,927 | C | T | 930 |
| rs1547421 | 5.34E−03 | −0.033132 | 0.671274 | 36,354,548 | A | T | 931 |
| rs4711471 | 5.38E−03 | 0.031352 | 0.45574 | 36,921,233 | C | T | 932 |
| chr6: 36665767 | 5.45E−03 | −0.125587 | 0.01862 | 36,665,767 | A | G | 933 |
| chr6: 37148839 | 5.49E−03 | 0.053277 | 0.849092 | 37,148,839 | C | T | 934 |
| chr6: 36696279 | 5.51E−03 | 0.326213 | 0.004339 | 36,696,279 | A | G | 935 |
| chr6: 36729139 | 5.54E−03 | −0.149407 | 0.985856 | 36,729,139 | A | G | 936 |
| rs3778022 | 5.59E−03 | 0.043761 | 0.862796 | 37,056,224 | C | T | 937 |
| rs10947595 | 5.62E−03 | −0.033683 | 0.689545 | 36,353,239 | T | C | 938 |
| chr6: 35837314 | 5.67E−03 | 0.044841 | 0.276259 | 35,837,314 | A | G | 939 |
| rs11550973 | 5.73E−03 | −0.14267 | 0.977484 | 36,762,942 | A | G | 940 |
| rs9462167 | 5.79E−03 | 0.033062 | 0.315519 | 36,348,089 | A | G | 941 |
| chr6: 37267550 | 5.79E−03 | −0.030893 | 0.516379 | 37,267,550 | A | T | 942 |
| rs2234066 | 5.92E−03 | −0.146617 | 0.983951 | 36,463,821 | G | T | 943 |
| rs6457939 | 5.96E−03 | 0.033077 | 0.311341 | 36,771,161 | C | T | 944 |
| chr6: 36756095 | 5.99E−03 | 0.057117 | 0.135769 | 36,756,095 | C | G | 945 |
| rs236458 | 6.06E−03 | −0.03232 | 0.383448 | 36,808,986 | A | G | 946 |
| rs6906101 | 6.32E−03 | −0.031109 | 0.603973 | 36,775,588 | A | G | 947 |
| rs236453 | 6.43E−03 | 0.031054 | 0.513853 | 36,810,252 | A | G | 948 |
| rs1753283 | 6.47E−03 | 0.21229 | 0.010519 | 37,063,236 | A | G | 949 |
| rs649804 | 6.62E−03 | −0.092315 | 0.964525 | 36,631,688 | A | T | 950 |
| rs1776447 | 6.64E−03 | −0.044111 | 0.131582 | 37,710,438 | T | C | 951 |
| chr6: 36578099 | 6.71E−03 | 0.306813 | 0.004806 | 36,578,099 | A | G | 952 |
| rs86702 | 6.75E−03 | −0.031345 | 0.381934 | 36,808,415 | T | C | 953 |
| chr6: 37135761 | 6.94E−03 | 0.082018 | 0.955277 | 37,135,761 | C | T | 954 |
| rs707992 | 7.06E−03 | −0.079507 | 0.039009 | 36,087,660 | A | G | 955 |
| chr6: 37019268 | 7.07E−03 | −0.041274 | 0.30547 | 37,019,268 | A | T | 956 |
| rs9357230 | 7.16E−03 | −0.030089 | 0.408957 | 36,963,360 | C | G | 957 |
| rs12664239 | 7.17E−03 | −0.030085 | 0.408964 | 36,960,498 | A | G | 958 |
| rs2395658 | 7.19E−03 | 0.030345 | 0.403628 | 36,774,728 | G | T | 959 |
| rs2395659 | 7.19E−03 | 0.030345 | 0.403628 | 36,774,729 | G | T | 960 |
| rs6457941 | 7.20E−03 | 0.030339 | 0.403672 | 36,775,043 | A | G | 961 |
| rs10807172 | 7.20E−03 | 0.030332 | 0.40373 | 36,775,861 | C | G | 962 |
| rs6905861 | 7.20E−03 | 0.030334 | 0.4037 | 36,775,245 | A | G | 963 |
| rs6928344 | 7.20E−03 | 0.030332 | 0.403713 | 36,775,343 | C | T | 964 |
| rs9470530 | 7.27E−03 | 0.082785 | 0.946616 | 37,271,954 | A | T | 965 |
| rs2293389 | 7.27E−03 | −0.042377 | 0.138305 | 37,053,260 | A | C | 966 |
| rs2788072 | 7.37E−03 | 0.029377 | 0.477653 | 37,274,753 | A | T | 967 |
| rs3176344 | 7.54E−03 | 0.077556 | 0.049128 | 36,758,525 | A | G | 968 |
| rs1015330 | 7.55E−03 | 0.035757 | 0.773277 | 36,894,050 | C | T | 969 |
| rs236451 | 7.56E−03 | −0.032443 | 0.344033 | 36,810,357 | A | G | 970 |
| rs2776790 | 7.68E−03 | −0.030836 | 0.536618 | 37,265,725 | C | T | 971 |
| rs6910832 | 7.76E−03 | −0.029252 | 0.524045 | 36,964,717 | T | C | 972 |
| rs2273109 | 7.81E−03 | 0.031703 | 0.69978 | 37,728,107 | A | G | 973 |
| rs588496 | 7.81E−03 | −0.078786 | 0.95924 | 36,584,025 | A | G | 974 |
| rs86703 | 7.83E−03 | 0.030351 | 0.618443 | 36,808,446 | C | T | 975 |
| rs3846873 | 7.83E−03 | 0.031694 | 0.699789 | 37,727,578 | A | G | 976 |
| rs236468 | 7.86E−03 | −0.030723 | 0.389956 | 36,804,882 | A | G | 977 |
| rs2842632 | 7.90E−03 | −0.029052 | 0.527457 | 37,273,796 | C | G | 978 |
| rs4714020 | 8.02E−03 | 0.029791 | 0.592779 | 36,956,027 | C | T | 979 |
| rs1830578 | 8.06E−03 | −0.04097 | 0.817923 | 36,489,180 | A | T | 980 |
| rs17624895 | 8.22E−03 | 0.041403 | 0.860362 | 37,056,013 | A | T | 981 |
| chr6: 37717751 | 8.24E−03 | 0.101227 | 0.032555 | 37,717,751 | C | T | 982 |
| rs62408382 | 8.28E−03 | −0.056439 | 0.093242 | 37,217,820 | A | G | 983 |
| rs3798478 | 8.44E−03 | 0.041266 | 0.860332 | 37,054,926 | C | T | 984 |
| rs72846864 | 8.58E−03 | 0.032493 | 0.700764 | 37,020,083 | A | G | 985 |
| rs753634 | 8.60E−03 | 0.041193 | 0.859747 | 37,042,672 | A | T | 986 |
| chr6: 36813797 | 8.68E−03 | 0.083737 | 0.040499 | 36,813,797 | A | G | 987 |
| rs11752000 | 8.69E−03 | −0.028678 | 0.519665 | 37,268,360 | G | T | 988 |
| rs2776791 | 8.77E−03 | 0.028497 | 0.474556 | 37,268,767 | A | G | 989 |
| rs900002 | 8.80E−03 | −0.028475 | 0.525472 | 37,269,369 | C | T | 990 |
| rs1757004 | 8.81E−03 | −0.028477 | 0.525475 | 37,269,101 | A | C | 991 |
| rs2842631 | 8.82E−03 | −0.028576 | 0.525194 | 37,273,687 | A | G | 992 |
| rs2788073 | 8.82E−03 | 0.028842 | 0.479678 | 37,274,867 | A | G | 993 |
| rs62408392 | 8.86E−03 | −0.068862 | 0.069925 | 37,253,444 | A | G | 994 |
| rs2776792 | 8.89E−03 | 0.028454 | 0.474483 | 37,270,263 | C | G | 995 |
| rs2842625 | 8.92E−03 | −0.028448 | 0.525531 | 37,270,534 | A | G | 996 |
| rs2293388 | 8.95E−03 | −0.04095 | 0.139722 | 37,053,040 | C | G | 997 |
| rs9394421 | 9.03E−03 | 0.028418 | 0.474427 | 37,271,122 | A | G | 998 |
| rs7758422 | 9.06E−03 | 0.048429 | 0.321273 | 36,452,348 | C | T | 999 |
| rs2842627 | 9.08E−03 | −0.028431 | 0.52556 | 37,272,892 | A | C | 1000 |
| rs9394422 | 9.09E−03 | 0.028405 | 0.47436 | 37,271,266 | A | G | 1001 |
| rs9368987 | 9.09E−03 | −0.028409 | 0.52561 | 37,272,132 | G | T | 1002 |
| rs2788070 | 9.16E−03 | 0.028393 | 0.474357 | 37,272,829 | G | T | 1003 |
| rs6934844 | 9.20E−03 | 0.028494 | 0.477982 | 36,961,287 | C | T | 1004 |
| chr6: 36865377 | 9.23E−03 | −0.110627 | 0.023431 | 36,865,377 | A | G | 1005 |
| rs2842629 | 9.24E−03 | −0.028374 | 0.525681 | 37,273,634 | A | G | 1006 |
| rs10807180 | 9.25E−03 | −0.028374 | 0.525269 | 37,272,675 | C | T | 1007 |
| rs9349017 | 9.28E−03 | −0.028727 | 0.508663 | 36,919,578 | A | G | 1008 |
| rs2265486 | 9.31E−03 | 0.028357 | 0.474288 | 37,274,308 | C | T | 1009 |
| rs2482014 | 9.33E−03 | 0.028352 | 0.474279 | 37,274,517 | G | T | 1010 |
| rs2485942 | 9.36E−03 | −0.028345 | 0.525739 | 37,274,520 | G | T | 1011 |
| rs2776794 | 9.41E−03 | −0.028334 | 0.525753 | 37,275,308 | A | G | 1012 |
| rs1766696 | 9.42E−03 | −0.028342 | 0.525692 | 37,275,430 | A | G | 1013 |
| rs9368990 | 9.43E−03 | −0.029205 | 0.506307 | 37,272,485 | C | T | 1014 |
| rs2622887 | 9.47E−03 | −0.028289 | 0.525843 | 37,273,426 | C | T | 1015 |
| rs10947687 | 9.50E−03 | −0.04193 | 0.132995 | 37,715,365 | G | T | 1016 |
| chr6: 36966993 | 9.58E−03 | 0.213443 | 0.991851 | 36,966,993 | C | T | 1017 |
| rs6457879 | 9.61E−03 | −0.042455 | 0.133758 | 36,188,031 | A | G | 1018 |
| rs2842628 | 9.71E−03 | 0.028208 | 0.474001 | 37,273,352 | A | C | 1019 |
| rs2622888 | 9.74E−03 | −0.028195 | 0.52603 | 37,273,485 | A | T | 1020 |
| rs190201 | 9.79E−03 | −0.029667 | 0.388822 | 36,806,263 | C | G | 1021 |
| rs236462 | 9.83E−03 | −0.029689 | 0.387241 | 36,806,272 | A | G | 1022 |
| rs9470501 | 9.84E−03 | −0.057052 | 0.09482 | 37,221,862 | C | T | 1023 |
| rs2788071 | 9.85E−03 | 0.028229 | 0.472625 | 37,273,806 | C | T | 1024 |
| rs7747099 | 9.90E−03 | −0.035998 | 0.808038 | 36,478,232 | C | T | 1025 |
| rs58214515 | 9.93E−03 | −0.028242 | 0.526198 | 36,935,394 | C | T | 1026 |
| rs12190328 | 9.96E−03 | 0.111444 | 0.971504 | 36,438,491 | C | T | 1027 |
| rs2482013 | 9.96E−03 | −0.028119 | 0.5261 | 37,272,784 | C | T | 1028 |
| chr6: 37105058 | 9.99E−03 | −0.126391 | 0.01401 | 37,105,058 | A | G | 1029 |

Shown is marker identity, p-value of the association, magnitude of effect (in units of fractions of standard deviations), frequency of effect allele, position in NCBI Build 36, identity of effect allele, identity of other allele, SEQ ID for the marker. It should be noted that a positive value for an effect represents a predicted increase in the interval by the effect allele, while a negative value for the effect represents a decrease (i.e. the allele correlated with the negative effect is predictive of a decreased value of the measure).

TABLE 24
Association results for QRS interval in a 2 Mb
region flanking rs1733724 on chromosome 10.

| | | | | | effect | other | SEQ ID |
|---|---|---|---|---|---|---|---|
| marker | P-value | effect | freq | position | allele | allele | NO: |
| rs1194743 | 1.64E−06 | −0.06424 | 0.788225 | 53,882,603 | C | T | 254 |
| rs1733724 | 1.65E−06 | 0.064142 | 0.211653 | 53,893,983 | A | G | 255 |
| rs1660768 | 1.80E−06 | −0.086762 | 0.747763 | 53,927,411 | C | T | 1030 |
| rs1822689 | 1.44E−04 | 0.044958 | 0.334457 | 52,902,908 | A | G | 1031 |
| rs293300 | 2.36E−04 | 0.043373 | 0.344204 | 52,901,452 | C | T | 1032 |
| rs1444400 | 2.39E−04 | −0.043345 | 0.65583 | 52,904,161 | A | G | 1033 |
| rs1444401 | 2.40E−04 | −0.043337 | 0.655839 | 52,904,934 | C | T | 1034 |
| rs10762173 | 2.44E−04 | 0.043301 | 0.344145 | 52,906,742 | A | G | 1035 |
| rs6480276 | 2.52E−04 | −0.043208 | 0.656361 | 52,907,458 | A | G | 1036 |
| rs293303 | 2.60E−04 | −0.043132 | 0.65657 | 52,907,727 | G | T | 1037 |
| rs72804145 | 6.73E−04 | −0.044201 | 0.627238 | 54,643,559 | C | T | 1038 |
| rs6480277 | 8.33E−04 | −0.03797 | 0.403846 | 52,907,653 | A | G | 1039 |
| rs7086422 | 9.58E−04 | −0.041523 | 0.280999 | 52,904,183 | A | T | 1040 |
| rs11819049 | 1.47E−03 | 0.035725 | 0.557925 | 52,894,756 | G | T | 1041 |
| rs10997697 | 1.47E−03 | −0.035165 | 0.454045 | 52,903,131 | G | T | 1042 |
| rs10997653 | 1.47E−03 | −0.035073 | 0.454106 | 52,897,035 | C | T | 1043 |
| rs10823055 | 1.48E−03 | −0.035145 | 0.45406 | 52,902,042 | G | T | 1044 |
| rs10997698 | 1.48E−03 | 0.035172 | 0.546226 | 52,903,212 | A | G | 1045 |
| chr10: 53895018 | 1.55E−03 | −0.811344 | 0.005792 | 53,895,018 | A | G | 1046 |
| rs10823045 | 1.88E−03 | −0.034606 | 0.462034 | 52,894,951 | C | T | 1047 |
| chr10: 53318983 | 1.95E−03 | 0.063728 | 0.806981 | 53,318,983 | A | C | 1048 |
| rs10823046 | 2.02E−03 | −0.034273 | 0.44461 | 52,895,127 | A | G | 1049 |
| rs10997707 | 2.03E−03 | −0.034325 | 0.444256 | 52,904,635 | C | T | 1050 |
| rs2204758 | 2.05E−03 | −0.04152 | 0.474983 | 54,005,381 | A | G | 1051 |
| rs12763554 | 2.40E−03 | 0.040307 | 0.229695 | 54,626,487 | A | G | 1052 |
| rs4935405 | 2.42E−03 | 0.040323 | 0.229334 | 54,633,858 | A | T | 1053 |
| rs11003448 | 2.45E−03 | 0.040438 | 0.228231 | 54,634,574 | A | G | 1054 |
| rs1947757 | 2.47E−03 | −0.040444 | 0.772122 | 54,635,488 | G | T | 1055 |
| rs4935064 | 2.49E−03 | 0.040445 | 0.227671 | 54,635,847 | A | T | 1056 |
| rs4935063 | 2.49E−03 | 0.04043 | 0.227699 | 54,635,708 | C | T | 1057 |
| rs11003452 | 2.62E−03 | −0.040423 | 0.773734 | 54,638,264 | G | T | 1058 |
| rs1444399 | 2.63E−03 | −0.033236 | 0.44389 | 52,896,208 | C | T | 1059 |
| rs11003457 | 2.70E−03 | −0.040428 | 0.774327 | 54,639,837 | C | T | 1060 |
| rs11003459 | 2.78E−03 | 0.040479 | 0.224216 | 54,642,766 | A | C | 1061 |
| chr10: 54758364 | 2.80E−03 | 0.251508 | 0.988748 | 54,758,364 | G | T | 1062 |
| chr10: 53289538 | 2.96E−03 | −0.683953 | 0.004533 | 53,289,538 | A | C | 1063 |
| rs293299 | 3.32E−03 | 0.038394 | 0.595613 | 52,894,489 | C | T | 1064 |
| chr10: 53800759 | 3.40E−03 | −0.090529 | 0.965244 | 53,800,759 | A | G | 1065 |
| chr10: 53956020 | 3.42E−03 | 0.068705 | 0.122152 | 53,956,020 | A | C | 1066 |
| chr10: 53803027 | 3.43E−03 | −0.090426 | 0.965262 | 53,803,027 | G | T | 1067 |
| rs10997677 | 3.56E−03 | 0.032423 | 0.565971 | 52,900,194 | C | T | 1068 |
| rs10997674 | 3.56E−03 | −0.032422 | 0.434025 | 52,900,083 | A | G | 1069 |
| rs10997680 | 3.56E−03 | 0.032427 | 0.56598 | 52,900,449 | A | G | 1070 |
| rs10997689 | 3.56E−03 | 0.032445 | 0.566023 | 52,901,690 | C | T | 1071 |
| rs10997673 | 3.56E−03 | −0.032418 | 0.434016 | 52,900,082 | G | T | 1072 |
| rs10997704 | 3.56E−03 | 0.032473 | 0.566095 | 52,904,530 | C | G | 1073 |
| rs10823063 | 3.66E−03 | 0.039223 | 0.760675 | 52,905,308 | A | C | 1074 |
| rs7099012 | 3.68E−03 | 0.032483 | 0.567971 | 52,904,054 | C | T | 1075 |
| rs35487357 | 3.69E−03 | −0.090088 | 0.965369 | 53,795,318 | G | T | 1076 |
| rs7475776 | 3.83E−03 | −0.037792 | 0.75859 | 54,621,021 | C | T | 1077 |
| rs1904055 | 3.90E−03 | −0.037494 | 0.758355 | 54,633,501 | A | C | 1078 |
| rs2384163 | 3.96E−03 | −0.039157 | 0.770859 | 54,638,622 | A | G | 1079 |
| rs2384164 | 3.97E−03 | 0.039149 | 0.229147 | 54,638,607 | C | T | 1080 |
| rs7893316 | 4.06E−03 | −0.038081 | 0.763844 | 54,640,124 | A | G | 1081 |
| rs4427482 | 4.09E−03 | −0.039124 | 0.780109 | 54,653,691 | C | T | 1082 |
| rs10824948 | 4.09E−03 | −0.038227 | 0.764469 | 54,641,955 | A | G | 1083 |
| rs10824949 | 4.11E−03 | 0.038201 | 0.234842 | 54,642,249 | C | T | 1084 |
| chr10: 54855843 | 4.15E−03 | −0.264039 | 0.006158 | 54,855,843 | A | C | 1085 |
| chr10: 53792299 | 4.29E−03 | 0.089136 | 0.034414 | 53,792,299 | C | T | 1086 |
| chr10: 53486939 | 4.52E−03 | 0.212315 | 0.993198 | 53,486,939 | A | G | 1087 |
| rs11003469 | 4.53E−03 | −0.038259 | 0.760925 | 54,654,665 | C | G | 1088 |
| chr10: 53505292 | 4.88E−03 | −0.208992 | 0.007455 | 53,505,292 | A | G | 1089 |
| chr10: 54643702 | 4.94E−03 | 0.057459 | 0.12899 | 54,643,702 | A | C | 1090 |
| chr10: 54104367 | 4.99E−03 | 0.065668 | 0.849988 | 54,104,367 | C | T | 1091 |
| rs12768931 | 5.14E−03 | 0.036391 | 0.243814 | 54,708,651 | A | G | 1092 |
| rs11003470 | 5.34E−03 | 0.037437 | 0.226097 | 54,656,453 | C | G | 1093 |
| rs10997657 | 5.57E−03 | −0.036549 | 0.246223 | 52,898,289 | A | T | 1094 |
| rs4935068 | 5.82E−03 | 0.036971 | 0.224359 | 54,659,289 | C | T | 1095 |
| chr10: 54837827 | 5.85E−03 | 0.31234 | 0.991998 | 54,837,827 | A | G | 1096 |
| chr10: 54753670 | 5.89E−03 | −0.047288 | 0.845708 | 54,753,670 | C | T | 1097 |
| chr10: 54844375 | 5.89E−03 | −0.115062 | 0.021768 | 54,844,375 | A | C | 1098 |
| rs1733725 | 5.90E−03 | −0.035229 | 0.7186 | 53,963,609 | A | G | 1099 |
| chr10: 54847515 | 5.98E−03 | −0.114928 | 0.021613 | 54,847,515 | A | G | 1100 |
| rs10997699 | 6.01E−03 | −0.036377 | 0.246484 | 52,903,244 | C | T | 1101 |
| chr10: 52934667 | 6.17E−03 | −0.1564 | 0.982538 | 52,934,667 | A | T | 1102 |
| rs72789121 | 6.18E−03 | −0.086357 | 0.966061 | 53,788,026 | A | G | 1103 |
| chr10: 52938997 | 6.18E−03 | 0.469787 | 0.0058 | 52,938,997 | G | T | 1104 |
| rs10824952 | 6.24E−03 | 0.036597 | 0.224111 | 54,661,875 | C | T | 1105 |
| chr10: 53998005 | 6.38E−03 | −0.131232 | 0.978244 | 53,998,005 | A | G | 1106 |
| rs16937295 | 6.51E−03 | 0.036372 | 0.224785 | 54,663,124 | A | G | 1107 |
| rs1903948 | 6.58E−03 | −0.036308 | 0.774508 | 54,663,943 | C | G | 1108 |
| rs12359399 | 6.62E−03 | −0.036214 | 0.239139 | 52,905,074 | A | C | 1109 |
| rs72797304 | 6.73E−03 | −0.044705 | 0.84877 | 53,020,574 | C | T | 1110 |
| rs11003500 | 6.96E−03 | 0.034821 | 0.241728 | 54,703,213 | G | T | 1111 |
| rs10824972 | 6.99E−03 | −0.034791 | 0.757999 | 54,702,500 | C | T | 1112 |
| rs12571947 | 7.06E−03 | −0.03477 | 0.75811 | 54,704,784 | A | G | 1113 |
| rs12572462 | 7.10E−03 | 0.034744 | 0.242046 | 54,704,993 | A | T | 1114 |
| rs12572208 | 7.10E−03 | −0.034743 | 0.757947 | 54,704,925 | A | G | 1115 |
| rs12573223 | 7.17E−03 | 0.034693 | 0.242348 | 54,704,962 | A | G | 1116 |
| rs5017564 | 7.26E−03 | −0.034738 | 0.758547 | 54,709,907 | A | C | 1117 |
| rs61844342 | 7.27E−03 | −0.053561 | 0.117716 | 54,209,134 | A | T | 1118 |
| rs10824954 | 7.36E−03 | −0.034471 | 0.757108 | 54,668,332 | C | T | 1119 |
| rs7085418 | 7.37E−03 | −0.034689 | 0.758396 | 54,709,239 | A | G | 1120 |
| rs10824955 | 7.37E−03 | −0.034462 | 0.757067 | 54,668,441 | C | T | 1121 |
| rs10824996 | 7.37E−03 | 0.03541 | 0.262132 | 54,735,339 | C | G | 1122 |
| rs10824979 | 7.39E−03 | −0.03467 | 0.758265 | 54,711,371 | C | T | 1123 |
| rs11003490 | 7.42E−03 | −0.034382 | 0.755851 | 54,676,334 | A | C | 1124 |
| rs10824978 | 7.43E−03 | −0.034678 | 0.75856 | 54,711,364 | C | T | 1125 |
| chr10: 54809472 | 7.43E−03 | 0.04452 | 0.720526 | 54,809,472 | A | G | 1126 |
| rs10508992 | 7.44E−03 | −0.03435 | 0.756611 | 54,669,439 | C | T | 1127 |
| rs1871071 | 7.45E−03 | −0.034339 | 0.756569 | 54,669,520 | A | G | 1128 |
| rs10824977 | 7.48E−03 | −0.034835 | 0.761311 | 54,711,260 | A | G | 1129 |
| rs2384174 | 7.52E−03 | 0.034658 | 0.23997 | 54,709,408 | A | G | 1130 |
| rs12770584 | 7.54E−03 | −0.034646 | 0.75983 | 54,708,792 | C | T | 1131 |
| rs10824957 | 7.58E−03 | −0.034286 | 0.756479 | 54,673,637 | G | T | 1132 |
| rs61862234 | 7.58E−03 | 0.034611 | 0.239965 | 54,708,016 | A | G | 1133 |
| rs12220148 | 7.59E−03 | −0.034282 | 0.756415 | 54,676,593 | A | G | 1134 |
| rs11003481 | 7.60E−03 | 0.034263 | 0.243341 | 54,670,038 | A | G | 1135 |
| rs1903963 | 7.60E−03 | 0.034261 | 0.243348 | 54,670,581 | G | T | 1136 |
| rs12219998 | 7.62E−03 | −0.036049 | 0.768808 | 54,746,198 | A | G | 1137 |
| rs11003496 | 7.63E−03 | 0.034148 | 0.245616 | 54,694,659 | T | C | 1138 |
| rs2891448 | 7.64E−03 | −0.034241 | 0.756669 | 54,673,344 | C | G | 1139 |
| rs10824958 | 7.67E−03 | −0.034225 | 0.756709 | 54,674,351 | A | G | 1140 |
| rs11003485 | 7.68E−03 | −0.034225 | 0.756682 | 54,675,558 | C | T | 1141 |
| chr10: 53818831 | 7.69E−03 | −0.049709 | 0.78008 | 53,818,831 | G | T | 1142 |
| rs10824982 | 7.70E−03 | 0.034581 | 0.23982 | 54,713,288 | A | G | 1143 |
| rs10762958 | 7.72E−03 | 0.034551 | 0.239775 | 54,711,002 | C | T | 1144 |
| rs10997722 | 7.72E−03 | −0.035461 | 0.236524 | 52,906,616 | G | T | 1145 |
| rs10824959 | 7.72E−03 | 0.034199 | 0.243271 | 54,678,249 | A | G | 1146 |
| rs11003491 | 7.73E−03 | 0.034192 | 0.243253 | 54,678,709 | A | T | 1147 |
| rs10762959 | 7.74E−03 | 0.034536 | 0.239515 | 54,711,055 | A | T | 1148 |
| rs4592336 | 7.75E−03 | −0.034522 | 0.760739 | 54,710,375 | C | T | 1149 |
| rs9633602 | 7.75E−03 | −0.034082 | 0.754517 | 54,689,232 | A | G | 1150 |
| rs9633603 | 7.75E−03 | 0.034082 | 0.245483 | 54,689,244 | A | G | 1151 |
| rs11003506 | 7.75E−03 | 0.034512 | 0.239559 | 54,709,073 | C | T | 1152 |
| rs10824976 | 7.76E−03 | 0.034531 | 0.23959 | 54,711,201 | C | G | 1153 |
| rs2384176 | 7.78E−03 | −0.03454 | 0.760389 | 54,712,378 | C | T | 1154 |
| rs10824980 | 7.79E−03 | 0.034505 | 0.239252 | 54,712,074 | G | T | 1155 |
| rs10824981 | 7.81E−03 | 0.034497 | 0.239248 | 54,712,256 | A | G | 1156 |
| rs10508993 | 7.84E−03 | 0.034478 | 0.239347 | 54,712,286 | A | G | 1157 |
| rs11003528 | 7.86E−03 | −0.035143 | 0.765431 | 54,729,270 | G | T | 1158 |
| rs2384178 | 7.88E−03 | 0.03447 | 0.239886 | 54,712,546 | A | T | 1159 |
| rs4935409 | 7.89E−03 | −0.03411 | 0.756821 | 54,682,301 | A | G | 1160 |
| rs7071141 | 7.93E−03 | −0.033979 | 0.754597 | 54,692,215 | C | T | 1161 |
| rs61859787 | 7.98E−03 | 0.036453 | 0.675132 | 54,772,196 | C | T | 1162 |
| rs11003492 | 7.99E−03 | 0.034069 | 0.243318 | 54,685,508 | A | G | 1163 |
| rs10823056 | 8.01E−03 | −0.035397 | 0.239679 | 52,902,114 | A | G | 1164 |
| rs12242179 | 8.12E−03 | 0.034236 | 0.241032 | 54,707,877 | A | G | 1165 |
| rs12763687 | 8.14E−03 | −0.034244 | 0.759132 | 54,708,883 | C | T | 1166 |
| rs10824963 | 8.15E−03 | −0.033858 | 0.754671 | 54,697,979 | A | G | 1167 |
| rs10824964 | 8.15E−03 | −0.033858 | 0.754671 | 54,698,123 | A | G | 1168 |
| chr10: 54698130 | 8.15E−03 | 0.033858 | 0.245329 | 54,698,130 | A | C | 1169 |
| rs4611109 | 8.15E−03 | 0.033857 | 0.245338 | 54,699,757 | C | T | 1170 |
| rs10824966 | 8.15E−03 | −0.033856 | 0.75466 | 54,700,017 | C | T | 1171 |
| rs10824967 | 8.15E−03 | −0.033856 | 0.754659 | 54,700,119 | A | C | 1172 |
| rs7893466 | 8.16E−03 | −0.033855 | 0.754654 | 54,700,401 | A | G | 1173 |
| rs10824968 | 8.16E−03 | −0.033855 | 0.754653 | 54,700,462 | G | T | 1174 |
| rs10824969 | 8.16E−03 | 0.033853 | 0.24536 | 54,701,083 | C | T | 1175 |
| rs10824970 | 8.16E−03 | −0.033853 | 0.754639 | 54,701,151 | A | G | 1176 |
| rs10824971 | 8.16E−03 | −0.033852 | 0.754636 | 54,701,475 | A | C | 1177 |
| rs7083984 | 8.19E−03 | 0.04751 | 0.303352 | 53,957,509 | A | G | 1178 |
| rs11003533 | 8.30E−03 | −0.03577 | 0.764187 | 54,733,956 | C | T | 1179 |
| rs57122015 | 8.36E−03 | −0.03589 | 0.770868 | 54,716,162 | A | G | 1180 |
| rs11003542 | 8.42E−03 | −0.035727 | 0.76991 | 54,735,955 | C | T | 1181 |
| rs35530863 | 8.42E−03 | 0.222023 | 0.990196 | 54,803,235 | C | G | 1182 |
| rs11003534 | 8.72E−03 | −0.035096 | 0.758558 | 54,733,977 | C | T | 1183 |
| chr10: 54805534 | 8.76E−03 | 0.109695 | 0.978254 | 54,805,534 | A | G | 1184 |
| chr10: 53533502 | 8.95E−03 | 0.192529 | 0.991187 | 53,533,502 | A | G | 1185 |
| rs11003478 | 8.96E−03 | 0.033797 | 0.343418 | 54,667,926 | A | G | 1186 |
| rs12768758 | 9.39E−03 | 0.035004 | 0.24711 | 54,708,578 | C | G | 1187 |
| rs12416467 | 9.41E−03 | −0.033385 | 0.271106 | 54,606,243 | A | G | 1188 |
| chr10: 54392639 | 9.60E−03 | 0.196393 | 0.983403 | 54,392,639 | A | T | 1189 |
| rs57989578 | 9.69E−03 | 0.033334 | 0.729273 | 54,606,150 | A | T | 1190 |
| chr10: 54380757 | 9.80E−03 | −0.165294 | 0.016277 | 54,380,757 | A | G | 1191 |
| rs12781547 | 9.90E−03 | 0.033942 | 0.236316 | 54,743,740 | A | G | 1192 |
| chr10: 53952604 | 9.91E−03 | 0.177414 | 0.980264 | 53,952,604 | G | T | 1193 |
| rs12775366 | 9.93E−03 | 0.034566 | 0.228292 | 54,737,123 | A | G | 1194 |

Shown is marker identity, p-value of the association, magnitude of effect (in units of fractions of standard deviations), frequency of effect allele, position in NCBI Build 36, identity of effect allele, identity of other allele, SEQ ID for the marker. It should be noted that a positive value for an effect represents an increase conferred by the effect allele, while a negative value for the effect represents a decrease (i.e. the allele correlated with the negative effect is predictive of a decreased value of the measure).

The application's sequence listing, which the Patent Office published only in electronic form, follows.

SEQUENCE LISTING (3623 sequences)

SEQ ID NO: 1 - DNA, 179 bp, Homo sapiens
acagtggaagtgctcttagcttctgactcctatttgtgtatgatggttttttcaaaggtggttaccagttgcattccctgcccagttctracattgtgaccagtggcatgcattggtgaggctgtagctgggtgtgatctgcaatgggaaagagttaacacagagcagaaggacgcatc

SEQ ID NO: 2 - DNA, 179 bp, Homo sapiens
tttgcatcttggaaggaggcagagtggcctggataaccaagagatcatttatatctggttatttttatggtgtctttaaaaagctcctaytgtgatcttctcttcttttagtgctgtgaacatcttactgctctgtgagtccttgatcccaaccccattccccacgctttgaccttctc

SEQ ID NO: 3 - DNA, 179 bp, Homo sapiens
tgagtcaggaatgcaaacccaggtttgcatgtactctgtgacttatccatgtagccccttttctctcgggatctcagttacgcaaatctrgaacagcgcctatctacctcaggggtatggaaggcattaaatgaaaggataataggaaaatactttatacctttattgccctgacattt

SEQ ID NO: 4 - DNA, 179 bp, Homo sapiens
cttgcctaaggtttcccctctcagggctgccattttctcagccactttcccaccttatgcacatgatgtaagaatggtatatcttccagwtggagaagttgagaatagaagacctccatgttcctgccttcagctttagcattcttgaggtctagaaactgggtgtgccttccagcatg

SEQ ID NO: 5 - DNA, 179 bp, Homo sapiens
cagaaaagaagggctttatacttgagtggcagagccccaagcaatgtccattctttggatgagtggcttattgcaccaggacaaagaacyggaatggaagggaccctcttccttcattcatgcaaggctccagacatcagcaggtgagacccagctgcctgggtgcatgagggtaggga

SEQ ID NO: 6 - DNA, 179 bp, Homo sapiens
gcaatgtggtggttaagatgaggaagagatgactgaggaatcacatgtctgatgtgtgagaagcacacagtcaattctctaatgcagggrttactggccacaggttaccatgagtgtgaacacatgaactccagctcattacctctccaaatgcgccctctgttcttttcaatgccact

SEQ ID NO: 7 - DNA, 179 bp, Homo sapiens
ctggaaggggatttggtagtcagcttgccagtagcattttgtttgctgtggggaggtaaagtgggatagtggaggaggtactgtgagatmcaaagcatgacttcttcagggccaatggggacaaacagccctgctgatacttgcagggatgctgaatgcaagggagaaagaaaaccttc

SEQ ID NO: 8 - DNA, 179 bp, Homo sapiens
aagctgggttttgctactgacaagttgggtgaccttggacaagccttttaaacattttgagtgtcagtttccccatctatatagtgggasgcatacactcactcactcaaatgcttgcagccaggtttggcaggccatggcacgggcaccttgaacacctcccatgctctgctgctaag

SEQ ID NO: 9 - DNA, 179 bp, Homo sapiens
atgaagatgatgaagctctcaaaccagctgtgctccacgatacggtagcaagtcttgcgcacctgccagcccacatcccatggactcttsgtggtatccagtttgcagcagggacagtggcgaatgcatcctgtggggagaggtgactgatggtgggtgatggccagtgggcaaagggg

SEQ ID NO: 10 - DNA, 179 bp, Homo sapiens
aatccagttgagcgaacactcacctgggatccacagaagacaaacaagctgtgcccacttgctgcctcactcccaggcttgagggcgccmgcatcagacacacatgccccaggtggcagcagcctggccgtggtatctgcatctcatgccctatcagacactacggagagacgtgggcc

SEQ ID NO: 11 - DNA, 179 bp, Homo sapiens
ctgtcccttcaccttctgtgaagcagtcatctggttcttccaggtcatctgccagctcagggatcttcctcaggatttcctcaggatctrggcagtccaccgtgctgccctcagaggagcttgtgtcgtccactccctgcaggggagaagcccagggcagtgaactcgtctctccgcgg

SEQ ID NO: 12 - DNA, 179 bp, Homo sapiens
ctcatattagtaaacctgatagctttgctaatggacccaaatggtggggcgggtccccatttgtcgctgtcaggcccctcctgcctagcyggggtcatggacaagaaaacaaaaacaaaaaaccaacacccagaagttgtgtactgaaaacattgagtagggacaactagccaggggag

SEQ ID NO: 13 - DNA, 179 bp, Homo sapiens
gccaccctccagcctctaccagcccactgctcagtgtctggctggctgtccaacctctccaggaagctgacatacctacctcagcagggrcctgaggaacagactcatctttccacgtctcacccagggatggagccaggtcctcagaagatgttccagtgcctgggctcctgggtgtc

SEQ ID NO: 14 - DNA, 179 bp, Homo sapiens
ggccacctggagctccctaagagccccaaagtaactgaaaatgcttctgagtggcagacagctgtcacagagttcatgctctctgctgtyacctagacaaaggcatgtaaaatatggcagctgataacagcagctgctggaacacaagtgacgactgcagggaagaaggctatgggaga

SEQ ID NO: 15 - DNA, 179 bp, Homo sapiens
tatgctataaattactcaaaaatatgatctgccttctatggttcataagtatcaatgtgcttcattgactgtggctgagtcagggtcttstactggggtggtggccttgcgatctgtactctgttctatagccacaggcctgatccctcctgaatatgggcctcttctgtggaggtggg

SEQ ID NO: 16 - DNA, 179 bp, Homo sapiens
tttaatcctgttatacagtaagtgctgtatgcacctctttatgtgatgggggagagcgggtccacgttcaccttacacccaatctggaarttactctcctcatatgggaagcagagcttaaaacaacaactctgtggactggtcacagaggcagctgataaacacaaataaaaactgag

SEQ ID NO: 17 - DNA, 179 bp, Homo sapiens
gaatttaatttagagcaattctacaaagtgctctgcagaattaaatgcaaatacctctggaggaacctgcctttatctcaggtttcaaastattccctcaaaaattgtttaagagttgcagtaaaaaaacaaacaaaaacagaaggaatgagtcatcaagagtgaatgagatcttgaag

SEQ ID NO: 18 - DNA, 179 bp, Homo sapiens
tttgaagttatattggcctccttcaggcatggcaaagtcacttcttggagtcccacctagagctgtctggcttgcattaggctatgataygagtgagaaataaacctttattggggtcagttactcagttttagagattgtctgtataataggtagctttatttttcattgattaataa

SEQ ID NO: 19 - DNA, 179 bp, Homo sapiens
tgcatccttcttatggagaagaaaacaggctgagagtttaagtgactttctcatgccacaagactgattcaaagagtatctatggagtgycccttgtaggcaagtcagtgtggtgtggtggggggtagggttgaggtcttgtgtcttccagagacctgggtccaccctggatccaccct

SEQ ID NO: 20 - DNA, 179 bp, Homo sapiens
tggggcagcaatcccagatcagatacttctgagacaagctggtcaagcagggtgggcacttctgttcagactcctcgagttctgcattayagtgtggtcaatgacagctgtcagccatgtgtcaccttggaccccaattctgcggtcatcctctagaccttgttgttaataataagtac

SEQ ID NO: 21 - DNA, 179 bp, Homo sapiens
gggggtgcaccaggagtctggggagcaggaagggtctatagtgggaaggagacatagttgtcattgcatacacacttgcagtgtttaggkttttttttactatatgcacttgaaaaatcagtttagagaaataactgtgtgcccccaaattttgctaacagtgttttttcctgataatt

SEQ ID NO: 22 - DNA, 179 bp, Homo sapiens
ctcctgggtctcttctatatattcctctatttaatttctattggttataaaatggctttagataaaaactgcattaggtctatttaccasatgaatgtacctgggaaaagagggagaggatgccttcctgagtgggctccaataaatcaattagcattaaagaagtacttaaatggtgc

SEQ ID NO: 23 - DNA, 179 bp, Homo sapiens
gataaaaactgcattaggtctatttaccacatgaatgtacctgggaaaagagggagaggatgccttcctgagtgggctccaataaatcarttagcattaaagaagtacttaaatggtgcctccctgtctttgcacatacatgttgttctttctgccaggaaaatactcctccccaaact

SEQ ID NO: 24 - DNA, 179 bp, Homo sapiens
gagggaagtgagaggtataaagcataaaaaaatagccatgttgatccccttttccacactgttagtgtggagccaccctcccacacagcmgatattatctgtcagacctatagaaagggcatatttggggtaaaaggactttcaaggggcaggaaggtggtgggaggaagcgtggcgag

SEQ ID NO: 25 - DNA, 179 bp, Homo sapiens
gattggcatgttcagtatgggcttcccacctttcctacaaaccggggttcttcctccagtgtcctcatcttggaatcaccacccatttgrttgcccaatcctgaaacctgggagtcaaattggactcccctttcctttttccacagtccacaatcccaatcttgttgatccacttccct

SEQ ID NO: 26 - DNA, 179 bp, Homo sapiens
ttcaagacctagtcttcctcttattagcaggatgatcttggacacttggtctgtttaggtattggtttctgttatccataaaacggggaygctaatactttcacgtcagaatttcatacacaggggagtggcctggggaaggcagctgactgcccagacacgatactataagctctttg

SEQ ID NO: 27 - DNA, 179 bp, Homo sapiens
atggagccgtcagcctctcaggcactgggggtgttgtgagctctgcttttccaagctctcagccatggaggtgggtgagatgggcctttytgatcttttgcctaaagtctttctgctcatgccttcctccagtggccaaagcagcaggcagagctgaggggtcctcatcccttagcttt

SEQ ID NO: 28 - DNA, 179 bp, Homo sapiens
atatgtagacattttttggaataggtagccaatgtttacggttgggagattttatataaaaatctaaatttcctatctctattttaaaakttggaagagctggaaacagtgaacccacatttccacatggcaaccaaaagctggaccgagcagtggggctgtcccctttagaggaggca

SEQ ID NO: 29 - DNA, 179 bp, Homo sapiens
gggaactcaccctgagtcagatccattgccacacagtaaggggtcagaagtgcctcgcttatttatgtagatatctgctgaagaaaggargaaaagaaagcctcacagatggttctgaaccctccaacccaagccttgtgtggtgaatgcaatattcccaagtcttccaaagtgagctc

SEQ ID NO: 30 - DNA, 179 bp, Homo sapiens
aagaaagagacacagagaaacagagaggtgagtttagcaatagaaagagactataagaaacactgagacagtcactggggcataaatagracttgtgccaagcacagctggcagcaaagaaggatacacctgcttgtttaaggagggatgatttgttgctctggtaagtaaaatcaact

SEQ ID NO: 31 - DNA, 179 bp, Homo sapiens
tgcttgtttaaggagggatgatttgttgctctggtaagtaaaatcaacttctttgggagagcagcttcgcaggtagcagaaagagctctraccagggaagcaatctaggatttatttttggttagtcattttggtcagcaaataatccactgagcactacatgtgtcagtccctggact

SEQ ID NO: 32 - DNA, 179 bp, Homo sapiens
caagaaatggtagaaaagacttccactctagaatgggtgtttctgtttacagataagagaacgaattcttggggtgagaggagagaaccyatcaggccacagaggggaagcatcaagtcccatttcagaaagtttgccttgtctctggcctccccatcctcaccatcaacctcatgggg

SEQ ID NO: 33 - DNA, 179 bp, Homo sapiens
tggactacttttgtttctgaattctcagtaatcaagaattgcctaattcttttttcctctgggtgtctaaagacaggattttagacctayggaaacagtgaagatactgggactgctttctcccttcctccccatttccaagtttaatcctttagtttaaggtataaataaaaattcaa

SEQ ID NO: 34 - DNA, 179 bp, Homo sapiens
ttcttgcaggagtaaggtggtatctcattgtggttttaatttgcatttccctgataattaatgatgttgagcatttttttttcctgttcrttggccatttatatatcttcttttgagaattgcgtattcttgtcctttgcccacttttggatgggattatttgtttgttttcttgctga

SEQ ID NO: 35 - DNA, 179 bp, Homo sapiens
ttttaatttgcatttccctgataattaatgatgttgagcatttttttttcctgttcattggccatttatatatcttcttttgagaattgygtattcttgtcctttgcccacttttggatgggattatttgtttgttttcttgctgatttatttgtgtttcttatagatgctggatatta

SEQ ID NO: 36 - DNA, 179 bp, Homo sapiens
gtcttgctcctgcagtgccctactcagaccttgccccaggctgtgagcttccccactgagaaagaaagcatgacttttggaccgcatccytcactgtctgcttgcagttcccatttgccccctggattctgctcaagaaaatttgtgcccagttgaaattattactaattttagttgaa

SEQ ID NO: 37 - DNA, 179 bp, Homo sapiens
aatttccagcagtgtgccacttatttaaaaggatctatgaattctttcagttctcctggtatattcctgcagtggttcttggagcaaacrttcatggtgtgagtctccacactctgtccaagtgggacctgcatgttagccctgtctcctacccaccattttgtcccctctcctatcac

SEQ ID NO: 38 - DNA, 179 bp, Homo sapiens
agtatttgaactaatttatgataaaaacatgctttccattagattagctgcccttgattattttaacatattttgaagttgtaatacttkgtgattttaaaacatattagatttttattatgtattttattgtgataacagacacataacatgagatctaccctcttaaattttaaata

SEQ ID NO: 39 - DNA, 179 bp, Homo sapiens
tgatttcatttagcagtgttttgtagtactccttgtagagatctttcacctccttgattagctatattactaagcatttcattttattgrtggctatgtaaatgggattgcattcttgatttgatgctcagcctggatgttgttgctggatagaaatgctagtgattttttttaaattt

SEQ ID NO: 40 - DNA, 179 bp, Homo sapiens
gagttattcaggagcaagttgtttaatttccatgtaattgtgtagttttcagatatcttcttgattttgatttctgtatttattgtaccrtggcctgagagtatgcttggtatgactttgattttttttaaaatgtattgagactttctttatgaccaaacatttgatcagtcttagaa

SEQ ID NO: 41 - DNA, 179 bp, Homo sapiens
aattatgttgtttactcaaaattttggtctttcttggtgggagcagcactttcttgtgcatctagtcagccatcttgtcccttctcttcrgctcttctttaatttcagagaaactacgggattgttcaagtgggaaagaaccactggtgttaaggcaggagaaacttgtaaatcagcta

SEQ ID NO: 42 - DNA, 179 bp, Homo sapiens
catgcagaaatggtgagataaagggaacattgatcaacttgttgaggatggccctgtcttgtcagtggaaaaaagaggcattgaaagggrtgagtaatgacagaagcttttttcctagtaggatgcatatggagtgatagtgggatataatcgtgagcaataatatcggaggataatga

SEQ ID NO: 43 - DNA, 179 bp, Homo sapiens
ctggcagtaagctcagctgtgtagcagatagtgaataggataatatagttctattaatatgttctagaagacaggttaacatactaaatkaaatggaagtcaattgggctgtttctgaggaaaaaagtgaagaaggtagaggctgaacttttaggaatcagaacacacttggaaggaca

SEQ ID NO: 44 - DNA, 179 bp, Homo sapiens
aaatgcctcaacatttgggaggcactataaattgtatttgaacatggaacttctctatataacatccttcctggcttcataggctcacakttgtaaagtttcaacacttaacattgtagtggtctgttaatctcttcctgctgccttagcaaaatatcatagaccaggtggctcaaaca

SEQ ID NO: 45 - DNA, 179 bp, Homo sapiens
tcagagagatatccttaccaccctatttaaaactgttaaccaacaccctccccaccccgctataactcctgacttcactttctctactgwtttttcttttctgaacagtcattatcatcttctaaggtagtacataatgtattcattttgtgtattgtttattgtctgtctcccattaa

SEQ ID NO: 46 - DNA, 179 bp, Homo sapiens
accaccctatttaaaactgttaaccaacaccctccccaccccgctataactcctgacttcactttctctactgttttttcttttctgaayagtcattatcatcttctaaggtagtacataatgtattcattttgtgtattgtttattgtctgtctcccattaagtatacgatccactag

SEQ ID NO: 47 - DNA, 179 bp, Homo sapiens
tttattttgttcactgatgtatccaaagtacctagaatagtgcctggcccatagtaggcatttaatatatattgttgagtgaataaaagmacagctacaaagttatctatagaaaaatattacatttatccattaaaaattaataatattaaggaaacactatgttacacaagctggat

SEQ ID NO: 48 - DNA, 179 bp, Homo sapiens
taaagagcttagttctgtttgtggtcacttaatgttgtgtgttagatatccaagtagagaaagagcagtatatatgaataacaaatcaargttagaagtctgagcttgaaacgtgaacttatactgactccactaaaaagactcttttattatgaagagtttgatgtaaagtagacatg

SEQ ID NO: 49 - DNA, 179 bp, Homo sapiens
aaatatttcattataagaaataaagtgaataacttttgggtatttcattagtctctctgtcattataattacagaatttttaaagaaaargtttataggaaaggagatgtgatagtaaccacttgctattatctctccctccatcagctacttatatttcttcttgcgtatggccacac

SEQ ID NO: 50 - DNA, 179 bp, Homo sapiens
ttttaaagaaaaggtttataggaaaggagatgtgatagtaaccacttgctattatctctccctccatcagctacttatatttcttcttgygtatggccacactagacataaaacacattttatcttcctaatcacattatcgatttattatattccttgcctcatagccttttgttttg

SEQ ID NO: 51 - DNA, 179 bp, Homo sapiens
taagaaattcattcacgtgttttttattcatttagtcagcttcccattctacaaatatttttagtacgtgtcatgtgaaaggcactactrttttctctgcattgagtgtggtagatgttcagggtagatgagatgagatgacagatggtcctagacacccagtaaggatgaagtactgt

SEQ ID NO: 52 - DNA, 179 bp, Homo sapiens
tttaacaacttagtaataagtggcatcatatggcatatatttctctttgttaattacaaaggaaactccgaggacaggttctacatttcrtttttgttaacttatattttgttctttgtttttaagtactatgtcctcagtaccgtatctggcatatagtagggcttattaaagatttt

SEQ ID NO: 53 - DNA, 179 bp, Homo sapiens
agctggtttgggtcataaattacttgttaattgtgtatttcttttttagaagaaaaaggaaatgataggcttctttttttccgatctccwcctgcctgtcattggtaggtggcataatgatctgagagagctgaggaaattgctgttcagaacttggactagttttaggtcagaggatt

SEQ ID NO: 54 - DNA, 179 bp, Homo sapiens
acaggacttaaaagaaaaatgatgttaacaaatagctgctatttactaatccctgaccatgtatcagcagtatgctatgcacttcacatstataaactttatttaaacctcaaaacagccctctgtgtaagactctttttttttaggtccatttactaatgagaaaacagaggtacaga

SEQ ID NO: 55 - DNA, 179 bp, Homo sapiens
atggttatatagatatagtatctgctctgcttcacttaagatttaataattaattattaatatcataacaggttacaagataaaatatcrtatgattatctccacagataaaaatagtaataataaaatgtaacacccattcctgatattaaaatgaaaacaaaacaattcttagtaaa

SEQ ID NO: 56 - DNA, 179 bp, Homo sapiens
gacacacatgcagccaaaaagcatatgaaaatacaggtcgacatcactgatcattagagaaatgcaaatcaaaatcacaatgggacaccktctcataccagtcagaatggctgttattaaaacgtcaaaaaataacaggtgctgacgaggttgctgagaaaaaggaatgcttatacact

SEQ ID NO: 57 - DNA, 179 bp, Homo sapiens
gattttttaaaaatcaaattcagaatgtcaaaagcaactgtgtgattaagtcccaaattgcttcttcctgctgagacattgttctccctrtgaaactttctaaatttaagattcaaatatgtggaaaattattaacgtagctataaaacaattttacttggttgttaaaaaattagcaa

SEQ ID NO: 58 - DNA, 179 bp, Homo sapiens
attctttttctttttatcttattgccatagactttgcttcagacatgtgtcatttaccaacccctgaacagttcacatttcttttcctarttgagaaataataaaagttgtaaaatgacatttagtaattgaacacggtttcttgccacagatactctgccttggggttccaaggacat

SEQ ID NO: 59 - DNA, 179 bp, Homo sapiens
tgtcatttaccaacccctgaacagttcacatttcttttcctagttgagaaataataaaagttgtaaaatgacatttagtaattgaacacrgtttcttgccacagatactctgccttggggttccaaggacattaacgtgactggtttaacggtttcctcctgttaagagagaagagggt

SEQ ID NO: 60 - DNA, 179 bp, Homo sapiens
gtggggtcagaaaggattttctctggttaccacctctcagaatgccttgcacaccctggattctccccaaaaatgattgactaattaacwgttaggaccatttaccagcatttgagtgtttagggtggactcattttaaaaccccagctgtttacaggctcctttctaggtcattggaa

SEQ ID NO: 61 - DNA, 179 bp, Homo sapiens
aattaatgctctcctgttagtctcctaggatctgaatacctgtaatattaaataatataatgaaaacactttaaaattaaatgagcccaraatgataatgcttctcaagtgtagatctgcagtttacaatataaaatagcaagatgagacatctgattatttgtttctatttatttgct

SEQ ID NO: 62 - DNA, 179 bp, Homo sapiens
catagtcattgtttatgctggaaaaaaatctcaacattgtgcttattaaactaacagagctattacacatgcatgttttttttccaatcyaaattccaaagaataagatccctgtgcctattttcaacagcatctacccttaccccaatctcttgtggttttggctcagtgatctggta

SEQ ID NO: 63 - DNA, 179 bp, Homo sapiens
ccctaccttcctcttaaaaccatttcctttatatacttttcctaactaatcagcctgcccttatgacactctgttcttaaacttttattrtatttacttgattttctaaatactgtcacactcatttgttttaaaattatgtactgtgttattcttgtactgagagcaaagagtttatt

SEQ ID NO: 64 - DNA, 179 bp, Homo sapiens
taaaaagcaggaaaaggtacttcctggaggaggagaacaaaggcaattcctccaacacctcaccttgtaaggcatggggggagaggaatrcttctaacatacaatttcttgggttttggttggagagcgctatgctttatcagtctaagcccagaaggagggaaatggctgaggactat

SEQ ID NO: 65 - DNA, 179 bp, Homo sapiens
gggaaagaatgttgtcctaaggtagatgggagcatgctgccatttatagaagggtagttgctggatgatagaaagccatagaaagcaaaraagtgtaagagcagaaacaaaaaaaccaaacatcgcatgttctcactcatagctgggaattgaacagtgagaacacttggacacaggaa

SEQ ID NO: 66 - DNA, 179 bp, Homo sapiens
agaaggcttatcacaactatgtctaagtctaccttgttttcacagctataaaatggggaaaagaatatctacctcataagattatactamcaattaaataatatggtgcgggtagaatgcttagtaaaatttctggcacacagaatgtgtttaataaattggtgcttaagatgaatcta

SEQ ID NO: 67 - DNA, 179 bp, Homo sapiens
tttctgagcatccctgcaatgaagagaacccagggaagttcctttttgaagtagttccaggtaagatattttcctagtctgattaaattmttgtcatcctgtgttggtaaaggtgaagatgggtcagacaggtttcattcttttttgaatcatgactgagaaccttaatttgaggcttg

SEQ ID NO: 68 - DNA, 179 bp, Homo sapiens
attggagataaagagtcaaccatcagttcaataccacgctgatttaaaagccaacatgcgctattgtctgagaataaatcggaaaagacrtttcctctactgatacttcaaagactttgtaacatctggaatctggttctatacagggtattccactaagaagtaagaataaaaggatt

SEQ ID NO: 69 - DNA, 179 bp, Homo sapiens
tgcactccagcctgggtgacagagtgagactccatctcaaaaaataaagtaaaaaaggcctggagcctattttctgaaatatgagcatgygaagttattttttgaactggaatggatacactggtatctttccagactcattcattaagaatgagaattttggcacttgataagagtag

SEQ ID NO: 70 - DNA, 179 bp, Homo sapiens
aattaaaacattcctacattttcatataaaatatatgtcaaatattggcttacattttcaaatgacagcaagttaatgtagccaatgacrttatttattcaacccagaaggagtcacaaatgcagacatgtatggtaaacttttattgctgttgttacattattatcccaaaaactcaa

SEQ ID NO: 71 - DNA, 179 bp, Homo sapiens
atacacttgaaagaagctattaacatggtacaaagaacgttttaaaaatgtttttaatcctttggaattctggctaatgtcatttcaacyaacatacatttggggcatttacgaactgatggacagcatgatcatacgatcctcctgtgaagtgtccctatgaggagtgagtgtcctct

SEQ ID NO: 72 - DNA, 179 bp, Homo sapiens
actttatgaataccattaataggagatgggatgtgcctagcatgaaaaacatgtcccatattttattcagtccacacaaattcagggagytatttacaaatattctgagattgaagcaactctggcaagatcaaataagcttgaagtgtcttctaagctttcctttatatgatgtacat

SEQ ID NO: 73 - DNA, 179 bp, Homo sapiens
tcttattggtataagaaggtggttttgtgggcgcagatgggtgtgaatcctggctttaccacttattaaaaatgtgaatttgtaccaccrttttgcatacatacacatatacatatatgtatatatacacacacacacatgcccagtctctctctctgtgtgtgtgtgtgtgtgtgtgt

SEQ ID NO: 74 - DNA, 179 bp, Homo sapiens
ctcattctgacatcgtttctaacctattggtttttctctccactggccatcaagtcacccaaacacactctttctgtggctcaaagaagycctaccatagacaaagacctgcctggacaaactctatttgtaataacagcagctgacatttgtttagtactttgctattttcatagctt

SEQ ID NO: 75 - DNA, 179 bp, Homo sapiens
gttccttgtatgtattttggggaaacacaagtaagcccatatcagaattaaaaaggaaatgagacttaactgttcttctaaaggcttctstattttaggggacaaactttccctcatgtttctgactgactgtttgagctccaccctactcctcaaagaaagaagcagaaatccagacc

SEQ ID NO: 76 - DNA, 179 bp, Homo sapiens
tacttgggaggccgaggcatgaaaatcacttgaacctgggaggtggaggttgcagtgagccgagatcataccactgcattccagcctacmtaaaccaagcacactaggaatggcagtggtattcctacttatactgacaaaatcaagaaaatttaatactaatataatcaaagagaata

SEQ ID NO: 77 - DNA, 179 bp, Homo sapiens
aaacaaacaaaacaaaacccaaaggcatgtactctgtaaggaggggatccagcatgtgtgaaaggccatcgatctgaaaaatctgtggamattcgtgaactatgtggcaagtctgtgtggctggagcatgggagcaaggggcgataggggatgggatcctgtaggctataagattgaac

SEQ ID NO: 78 - DNA, 179 bp, Homo sapiens
tcactgtcactttttccataatcctctcattggaaaagagagtttttaaagagtagatctttttatttggttttggtctttgaactacawaatcagaccacatagaatggtgtcagctgctctagtaaaatgcaactacaacacaaaacatgaaaaaaaagtaccagtgcctgtaaaaa

SEQ ID NO: 79 - DNA, 179 bp, Homo sapiens
atttccacaataatgccattaaaatcggttctttgattaaatccaattaacagatgtggaaactgaggtttgtgacaaggttcaatcccygatttctgtgactccaaagtatgtgctgttatttaatgtttatgtattctctattatgaattgttttcaagttttttaaaatatcacta

SEQ ID NO: 80 - DNA, 179 bp, Homo sapiens
acaggccaaataagactgactgcaagttagcacaagagtgcaacgactctatgttatcctggctccctcattcaaggaaacacgccaaawcttaagtaaaaataatcttaaaacaaccttaattataaataagcaaatctcttacaaatggcactactttatcattaattagcaactac

SEQ ID NO: 81 - DNA, 179 bp, Homo sapiens
tatcattaattagcaactactaagttgtagcatataacacagaagtatggtatcaagactgaaaactaattgattatttaattcctagcwtcttttcaagttctcaaatcccaagatttgcctatggttgccaccaagagctatggaattattgtttggtaggtgattttcatcctcca

SEQ ID NO: 82 - DNA, 179 bp, Homo sapiens
aaacaaaaccattctttttaaggaattcatccatttgtagatgcatctgtttccagtggttccagtgtgtttgttttgattatcacataygaattcagctttgtccaaatatttatagaaaaacatagaagccatgttctacttgaaaagtgcttttcattttgtaagacccttgagta

SEQ ID NO: 83 - DNA, 179 bp, Homo sapiens
gaaaatggagggcacatttagacttgtctagctgtttagtggaggctggcatatgatattctgtaccgcctggctaattccctctaatgrttggactacctttaagaattctctgaaataaggacttaacaaacaaatggcatgcatggggaaagatatatttttaaaagactaaataa

SEQ ID NO: 84 - DNA, 179 bp, Homo sapiens
ttttaaaatcattaaggacagaacctaaatcatcaggacagaacattttataaaaatggtgctgtgaataagtaaagaagatttggaggrgacaatgttttaaaattttgtgagtgactttaaaaataagagcgacaaaccaggtatcctttaaaaccaattagacttttaacctagca

SEQ ID NO: 85 - DNA, 179 bp, Homo sapiens
ttagaaagaatatatgatccagacaaaattaacagccaagtatttggacgtttaaataaaatgggagtatttttaaattgtggatatatragagacacagtaagaaactgatatatgatgcaatatatgcaaactttgaaaaaagatttacataaaaataaaaatgccaagagaaagaa

SEQ ID NO: 86 - DNA, 179 bp, Homo sapiens
ctcaaatactgttccatattctgacgtgggtcttattaaaatgttaatcaatcggtattaaatattaaggcacagcactttttttacagrtgagaaaagtgacaatgtgcttacatgttttggaatagtgaagggagcaccacaggagctggaaagagacaggcttgggtttaaaacct

SEQ ID NO: 87 - DNA, 179 bp, Homo sapiens
ggtttaaaacctgacactggtacttgtaccatcatttctgtcagcaaattgcttcacttcactgagcatcagttttcctctctgtaaaaytgcactaataacactcattaaaaatactaggttgtatttcttgtgtgttacgagagaagacagatgtaacgtgcctaacaccttgcttg

SEQ ID NO: 88 - DNA, 179 bp, Homo sapiens
cagtgaatattttcacagcactgattaaaatattcttttcaggagtaggaactgaactttttttcagttatctggttgatgtttaatttkggaaaaggttttcgatggatataagaggatgtgagagtgaagagataagatatcttctgacaccttcttgtgactggtgtaaaagaaaa

SEQ ID NO: 89 - DNA, 179 bp, Homo sapiens
cgacactgagcaagtcccttaattttttggttcctctgtttacaagtttataaaattgggatgattatttctgtcctgtctacctccccrggttgttacaaaatcagattaggcgaagcgtgtgaaggatccctgtagctaaaaagtgctattcagatgcaaggcctcagtatagattg

SEQ ID NO: 90 - DNA, 179 bp, Homo sapiens
tcaggtgatctgcccgcctgggcctcccaaagtgctgggagtacaggcgtgagccaccgcgctaggcctggaaagtttctattcttttayaccaattgtgattggtaacatcaggctattgttcatgtccccctctagcaaaagataagcttctaagaaatgcaataatgtttaagatt

SEQ ID NO: 91 - DNA, 179 bp, Homo sapiens
ttggtttatgtgagtgaattctcctattgattcctccaagctggaagtagcgatcaagagaaggggaaagataaaactgagtgaaagtgkttaaagggaaaccaataagaaatacatttggaaatctgactagattggtgaagacttttttattttaaggaagagaaaatcatgtgatt

SEQ ID NO: 92 - DNA, 179 bp, Homo sapiens
caaatggttttaaggtgcttgcagagagaaggaagactgagtccatagtaaccgctgtattatgatcaacagtcctattttgtttcttcyccaaagttcctgtttatgtctcgcagcctttatattgactttttaagaactcagccagttggccagtggccatggtaaaattgcaccac

SEQ ID NO: 93 - DNA, 179 bp, Homo sapiens
tttggctcatgtacagaaaatcatatgatactttttctttgagaacgagaaggaaaggaaagacagcgattgaagcaagatccaggagasggaaaacacatgccctgctgccagccttcccattttctccacctactctgtaccaaacctaattaacataagctaacaaatattattat

SEQ ID NO: 94 - DNA, 179 bp, Homo sapiens
atattattattaacaaaactgcgttgttttaaaggtgactgtgcttagcaatttgtgtattttagctgaatcattctttaaaacaaatgkgtgagaaagatagctctatcttgaaaaataggaaattgaggggaaacaaagtgtttaaaaactttgcccaaggtcacatagcccatgag

SEQ ID NO: 95 - DNA, 179 bp, Homo sapiens
gctgaataccaaggagtttactaacaatgagagtttctggaagaatttattgatggtttccttttaccaccaagaaatctctaagccaawttttcttttctccaatttttatttttacctcttcatactcaattttaaatttattatcataaagagagatgctgaagggatctgctttt

SEQ ID NO: 96 - DNA, 179 bp, Homo sapiens
ttgatgcagctcttttaaccactgagcttggtattgattgagaagcaagatgtgagattttgttagtgttgagctgtttacagaaacagraggtccattcctccccttttcttcagcccccagagtaattgtttttttttaccagcagtgaatacagaggagaaaccaaggacattttc

SEQ ID NO: 97 - DNA, 179 bp, Homo sapiens
agagtcaaacaaaaactctcacaattttaatatttagcaaatacagtcatgcactgcataacaatgttttggtcaacaacaaactgcatrtatgatactgttcccataagattataataccgtatttttactatgtcttttcaatgtttagatatgtttggatacacagtatttaccat

SEQ ID NO: 98 - DNA, 179 bp, Homo sapiens
taaacactggaaacttgaacagagcatcccaacagcaacaacaaaagcaaactgagtacctgggagggaggaaaaagaaaaatgataccwgttctttggcatatagattaccccaaaggggcaaattattaaagaaaaagaaacaatgttttaaattttcagtagcatattatagtcat

SEQ ID NO: 99 - DNA, 179 bp, Homo sapiens
gaaatagtccaactttcttatatttggttgcactgaagcttgggattggccaatagcccagcactgatggacaatttattttcattattktctgaaccacatttgtgtgtctaggaacttgtcaaagaatacagaccaaggaagggcctcctctattcatttccaacattctaccttgt

SEQ ID NO: 100 - DNA, 179 bp, Homo sapiens
cattttatatccaatgctttctcacctaagaaaattccaatagtcctcctattgttcacaaaataaatgtctccctacttcctaggtttrttttcttgggagtcttagaaataattattgttgttaccattacagttattttgtcaataactgcctgttttaatttctttataatacaa

SEQ ID NO: 101 - DNA, 179 bp, Homo sapiens
tgcctgttgttctattcatgtcctcggcagattgcattatgcccactcacataggtgagggccatcttctttactcagtctcctgattcraaggctaacgacttctggaaacacagtcacaggcacaatcagaaataatgttttaccagctatctgagcatcactagacccagtcaagt

SEQ ID NO: 102 - DNA, 179 bp, Homo sapiens
tagccttcaaactccatgtagctcaaaactcaatatttgacttgatggaactagggtatctgccaagttgactttcattctcgtttccaytggctgtcctagtatagtgtgtgaataagtcttccagacatgaagataattagattatcaagaggaatttgatgaaagatttgtacttt

SEQ ID NO: 103 - DNA, 179 bp, Homo sapiens
atagaattagctctaggctatctgctgtttcaataagaaaaactactgcagcattcaggaaatgaaagagatttccggaagctcttaggwcctctagcaaatgtaatcacatatctagttaggtacatatatccacagacgatattctggcaagtcaagatattatctggcctttgtgt

SEQ ID NO: 104 - DNA, 179 bp, Homo sapiens
cctgtcattcctagctgctggagccaaggggagatttgcagtgttaagtcaattgcagaagtagattagattttgccttcatgtttatgkacttaagttagatgtttgttgacagaagaatagtagctcatgcagaaagtataattaattcattaaagaaatatttgtcaaatgcctgt

SEQ ID NO: 105 - DNA, 179 bp, Homo sapiens
ataagtaaggaagaacaaaagatcatttcagacatggaaagggctatgaaagaaaattaaaatggggaaatgggatagagggtatatgtrggtgggaggatgcttaaccagagtggtcgggaaatcttctttctgaggaggtggcatttggtagcatcatcctgaatgatgagaagatc

SEQ ID NO: 106 - DNA, 179 bp, Homo sapiens
tgagtgaccttatacaaatcatatttttctctgggtttcacttcccttatctacaaaatgggttcacccggctaaattatatttaaggtmctgatgagctttctatgattcctatttcttattttgttttgttttgtttctaaatgctcaaatactacattatttaaggtatatttcct

SEQ ID NO: 107 - DNA, 179 bp, Homo sapiens
aattcttgtattatttttataggactttttttttcctcctgtgtccaccttccatattgaagagtgacttctttacttactggtgtagayagtttgcatatctctaataacttccttcaacctcaacaacctcttcatgattattttgtgctgggagcaagaacaccagaaaatgaaca

SEQ ID NO: 108 - DNA, 179 bp, Homo sapiens
accagaaaatgaacaagtttataaaaaattatggacgaataagaggcaataactttatctgagggtccaagagattctcttatgagaaaygtgcatgtgccaaaggacatagacacagtgacatctattttgggtgctcaggagacacttggcttgtgtccaagttcttagttgtgttc

SEQ ID NO: 109 - DNA, 179 bp, Homo sapiens
ctgcatcttatacagaaagtgtggtttgttctttttataaagttactggaggtgtgtgtcaaggaatcagtgactaaacaaatcccaagwggcatacctaatattaatcaagcactaagtgttttattttagtcccattcacaatcacgctgttcacatgcatgtctagctgggaaaca

SEQ ID NO: 110 - DNA, 179 bp, Homo sapiens
tcaaggaatcagtgactaaacaaatcccaagaggcatacctaatattaatcaagcactaagtgttttattttagtcccattcacaatcaygctgttcacatgcatgtctagctgggaaacagcataataatgctttgtaggaaagagagaaaaggaaaaaaatattcattttctggttt

SEQ ID NO: 111 - DNA, 179 bp, Homo sapiens
aagatactcaaactgactcaagtatgttcctacatattggcctttgtttaacatattaaattggagcttctggacagttgaagaggtaayatgaatccaaggttctttttgtattaatacatcttaatcatgaaataaatgtttgttgaatgactattactttcaaaccttaatttaaa

SEQ ID NO: 112 - DNA, 179 bp, Homo sapiens
cctatggcttcatcttaaagctcaatgtggatatctgatcagcaaagcctcttccaccctttgtgcgagttgtaacaaacgtccccttcytccagatgcacaatgctcgcatcaggatcttcagcttggcagcaaactgagctggatttcagcccctgctcagcctgcacaacctcaga

SEQ ID NO: 113 - DNA, 179 bp, Homo sapiens
catttattttgtgacaaatattgcctaagaaaagggataattcaaaaaaaagtgttttggattttttgtttgtaacagcttttgagtttsaaaaaaatctaactccataaggactcagggttcaaattttaaattataatgacaacaacaaaataaaacagatttctttaccctaccac

SEQ ID NO: 114 - DNA, 179 bp, Homo sapiens
gtaggatttgacctggttaggtcttgaccatagaggtgagaggattagggaataataaagtaatcttacaggagaatctccactttagayggtttaatagagcttcagattttagtttatatttcatacaaattctggtctctaaggatcacaaacatttattatctttccactcctta

SEQ ID NO: 115 - DNA, 179 bp, Homo sapiens
aaacatttattatctttccactccttaccagtgttatcttaagtgacacaaagcaaatgcagaaattttcataaatcactcaaaaggatkgttgcttggctgaaagtgccttataaactgagcccatactggtaatgagtgatcttttcccaagttcttaaagtacagctaagattccc

SEQ ID NO: 116 - DNA, 179 bp, Homo sapiens
tggctggagcccctagatagctccagcatagggtctggtctccagaaaggccaaggcacaattagaatgttggaactttcagtcccagcwctcaacctccagaggcaggagaggggctgaagtctgagttaattacccttggtcaataatttacttaatcatgcctatgtaatggaacc

SEQ ID NO: 117 - DNA, 179 bp, Homo sapiens
cactcattctgagatatgaaaatggtttcaatttatacctgaaatacaagattatatccttttgctcttcccagagtaaaaaatctctcyttcacatttattagagaactgttctttcaaccacaagcataaagacagactcttggtaggagttaaaaaggactatttgggatatttac

SEQ ID NO: 118 - DNA, 179 bp, Homo sapiens
tggtcagtagtgtccagttgtgcattgtgtatcctttaatggagctcaagagccagcctaatgaaaagaactgtgctttttagttaaatkatgtggtcaggtttgagttacaaggaagcaaaaacgatactgaaaaatttgtgttcttgaagatgtatagtagagagcagaaatataca

SEQ ID NO: 119 - DNA, 179 bp, Homo sapiens
ctattttctattaccatttctgctatttgtaagagtagtttccaacagccgaatgggggctgtgtaaagccattataatgcagtttacawctgtcaaaaggatatctgaattccattgaaatactaaagtggtagagtgaaacagagatgttatatgccactgaagattatttttctaa

SEQ ID NO: 120 - DNA, 179 bp, Homo sapiens
tcatcatttctaataatgtgtaacctcaatctgatgatgagaaaacatcagacaaactcaaattcaggggcagtctacaaaatcacagamtagtcatcttcaaaaatgtcaaagtcataaatggcaaagacaggaattgtcacagattggagaagactaaagagacataaaaactaaat

SEQ ID NO: 121 - DNA, 179 bp, Homo sapiens
atggtatttctccatgaaattaagatacatacaaagccaaatgacatttgaaagatgacttggtgaacctggactctgaagaatgtgccrtgtatgtaacaagtttttaataattcaactaagctattttataatgaagtgaatgtcacagaagatggaaatcaataaaattcattaac

SEQ ID NO: 122 - DNA, 179 bp, Homo sapiens
aagaattaatagcactggcttcttgatttcccaatatgaccaccagttgctatgtagcgctaaccaaacgactttacctctcataatctygtatccaactccaaagtttactgtgatgattaagataatatttatatgacccacctatataaaaatttctcaatgaagatagcaccctc

SEQ ID NO: 123 - DNA, 179 bp, Homo sapiens
aatcatggtatacctatctatatagagcagactccaatactattgtaaaaaaaaataagaaagctgtcttgagcataaataggaagacaktcaagatacacttttaagtttaagagtttaaaaggaaggtaaagccaggcacaatggcctgcacctgtagtcccagctacctggaagac

SEQ ID NO: 124 - DNA, 179 bp, Homo sapiens
tgggctcaccctttaatttggtggctgtgtgatcccttgggggagatttaatccccagcttcctgcgcccacactgtttcccagccagaytggaagaccgtgcttcctggttcctgcctgagggcaaaggggcagcttcctgaaccaaaaggggcacacacctggcttagctcctgagt

SEQ ID NO: 125 - DNA, 179 bp, Homo sapiens
gtattaaaagaggaacagataccagtttgaaagacaaagtcattgctttccctcaactaacaagtttcctttatctggcagctgggtggrgtgggagctccttgtaaacaataaccttcaaagccaggctttgaggcaaagggaattgtcctacagtgtttgaagtttctgttccctta

SEQ ID NO: 126 - DNA, 179 bp, Homo sapiens
cctgaaaatgtcagtcactgcatgtcctgcccaaatcccttctaggggacttttctcttccaaaagggccctccagggccccagttgatygctctgtgatggacacctgaccaaggtcagttcaggtgtaattagtccagctacttgtgctttatgggaccttgcttagcaaagaggag

SEQ ID NO: 127 - DNA, 179 bp, Homo sapiens
agaccatgtgtaggtgtctggcggagagccccagccagggcccctttcagccagcaccagtcctcaaatgggagcaagggagtgagtgaktgaggcttccgtgattccaccctaggctttgaattcccctgctgatgccaagtggagcagaaacaagctgtctctaccaagccttgccc

SEQ ID NO: 128 - DNA, 179 bp, Homo sapiens
aagtggcagattatattttccaaaaacaagcactgcaatatctcccatccaacatgcaacgtaatgttaacactccatccatcatttatrctctctcctcttaaatcaggtatcttccaaggctgggtcataaaaggtgatatggtttccacccagtcctctaggaatgcttattcttg

SEQ ID NO: 129 - DNA, 179 bp, Homo sapiens
gttgcatgttggatgggagatattgcagtgcttgtttttggaaaatataatctgccacttatagctaatgagctacagatgttaggaggwtggagagagtggagaaagcccctggcccacatgcagacaactgcatataaaatgtagcagaagattaagaggctgataaagctgctgct

SEQ ID NO: 130 - DNA, 179 bp, Homo sapiens
ataaaatgtagcagaagattaagaggctgataaagctgctgctgcagagaggagacagaactctaaaaaggatgtgtgacacacagagcrcagacacacttagtgcaggtgcaagctgcctagctgacctcggtaacgcctgaaactctcactattcaacagcaaagaatgttgaacct

SEQ ID NO: 131 - DNA, 179 bp, Homo sapiens
agagcagtcttactggggactgcacgcttaaccagtggagtctgcattaactccaggtggttactgccagaattgcactgcagtagggcytgtgtctttcttcactttggaaagatttgtgttagacacatctgcccagtaaatactatactgggttactgaaaaacttgtaatgactc

SEQ ID NO: 132 - DNA, 179 bp, Homo sapiens
aaagatttgtgttagacacatctgcccagtaaatactatactgggttactgaaaaacttgtaatgactctttgttgcctgttgttccaaygggagtgcaccctggcccctctgcctagcatcaaagacatgccattaactatgggagaaataatgtcttacctttaatgctaaaataag

SEQ ID NO: 133 - DNA, 179 bp, Homo sapiens
cagtataaaaagaggcattattggtgctctgcccagatcttttcagatctctcaggttccattctctctcccagtttctgtgtgattttrtttctaagagccatgcacctgtgactctttttggaggattactccagggctactggaactgcttcacccaggttcagaaactagttgct

SEQ ID NO: 134 - DNA, 179 bp, Homo sapiens
actaatatgaacaaggacaaacctttattattttaagacacagattttggggttgtttctgcagcctaacctaaaagatataatacaggyagcatagcgtagtagtcaagagcatgcaccctggagttacatagcttggggtcaaagccaagctctactacttactagctgtataacct

SEQ ID NO: 135 - DNA, 179 bp, Homo sapiens
atgaggatataacaagactgcaacccagaagagggccctcggcagaacccaaccatgctggcacccccatcttggacttgcagtccccasaactatgagaaatacatttctgttgcttataagtcactcaatctatggtactttgttatagcagcctgaatcgattaagacacctcccc

SEQ ID NO: 136 - DNA, 179 bp, Homo sapiens
agtcactcaatctatggtactttgttatagcagcctgaatcgattaagacacctccccagcatcccttccactcttcccacaactctcartttgtacttggggatttatgtggttctgaggaaactgatttcattgagccttaatgtggcctcatatgagccaaacaaccagtagtgtg

SEQ ID NO: 137 - DNA, 179 bp, Homo sapiens
gttgggcgtggagagatgagtgtcatttgtgtgttgtgtgtggaggtgagtgctcgtgtatctaaaaagagctttcaatatgcattaggytggacaaatgaaatttcaagtatttgatcagctttgatctacataaagggcaatttcatacgattcaacctaatagatcaaatacacat

SEQ ID NO: 138 - DNA, 179 bp, Homo sapiens
tggagttttaaaagcgatgttaatccctcaatccaaaaaaagtattaattttggacaattcactactttactgtcctaactcaactacayacctcttggaagcatcatattataccttacaagcttacctaacaccctcattcttccagccttggtgagaaattcagaaaggtctctgg

SEQ ID NO: 139 - DNA, 179 bp, Homo sapiens
gttaatccctcaatccaaaaaaagtattaattttggacaattcactactttactgtcctaactcaactacatacctcttggaagcatcayattataccttacaagcttacctaacaccctcattcttccagccttggtgagaaattcagaaaggtctctggggaaagatttctgcgagc

SEQ ID NO: 140 - DNA, 179 bp, Homo sapiens
ggtctctggggaaagatttctgcgagcaccttttgacaggttttggggggaccctcagggtcccgctatccagggagctcggtttcccckcagtgtttttctcctgtcaattcgcgggcaaccagcggggtgttcgagaccctggtggggcgggctccctcacttccgggacccccggg

SEQ ID NO: 141 - DNA, 179 bp, Homo sapiens
tcacctccacacacaacacgcaaatgacacaagtctctctgagcccaacaaaggccacgcaccactgcacaccccgacatcttgctggcrgcacacacagcatgcgcaaagcgtcgcacaaacgcatctgcacgcaaatgacacacacatctcagcctccacaccaaacacaactcaca

SEQ ID NO: 142 - DNA, 179 bp, Homo sapiens
acaccaaatacaaaacatacatttacaccactactgaaaaaacacattcattgcacacaaatggcatgcgtacgaaggttacccatataygctaaatccaacacactatatatacaagccctaacgcatgcatgcatcttacaagcaacatggacacatacatagcaacgtaaacccag

SEQ ID NO: 143 - DNA, 179 bp, Homo sapiens
acttatatgtaccacgccaaacgaaatcacacccacatctgacctacacacccctacgtacacctagaatgaccaaccgtccctgtgtgyccaggactggctcggttttagcattgaaagtcctgtgtccttggaagcccctcaattctgcgctatcccgaacagttagtcaccctatg

SEQ ID NO: 144 - DNA, 179 bp, Homo sapiens
gcataggtgctgttatgacagcgatgccggagaagtccaggtcagacagatcaggtctggggggagtcgcatccccctgcttcccctacscagattcctcctctcttgtcagctgtctgcacaaccccctttattccccatcctggctgagacaccgtggttggaatcaagaagccacc

SEQ ID NO: 145 - DNA, 179 bp, Homo sapiens
cagagacccaccctgggtggtattttttgcccacatgagcctgtatatagatatatagatagtctctgacttatgatggttcagcttatratttttttactttatcataaaattgaggaacattatctatctatctatctatctatctatctatctatctatctatctatcatctatct

SEQ ID NO: 146 - DNA, 179 bp, Homo sapiens
tttttttactttatcataaaattgaggaacattatctatctatctatctatctatctatctatctatctatctatctatcatctatctaygtctatatctatctgaatatattcttgtattggttctgtttctctggagaaccccgactaatacagtaggtctgaatgtaagttgtctt

SEQ ID NO: 147 - DNA, 179 bp, Homo sapiens
gtagcaaaaccagagctaaaaggatgtgaagccatttgcagtttttaattgtccctgttagtgtgaatacattacagcccacagctagcrggacctactgtcttggtttgcctgggattgaaggggttccctggacatggaactggaacagtctggggcaaactggctgactgctcacc

SEQ ID NO: 148 - DNA, 179 bp, Homo sapiens
tgaggtaggaggattgcttgaggctgggaggtcaaggctgcagtgagccatgatcacaccactgtactccagcctgggcggcagattgargccctgtctcaaaataaataagtaaataacatagaaaccggaaaacgattgaatcatgtttaagttacgcattgctgcctaaaaaatca

SEQ ID NO: 149 - DNA, 179 bp, Homo sapiens
ctgggtattcacactgttttgtagttgcctccccttgaacatttctggcttgtgactcttttagccaatagaatgggacagaagtaaccytgtgcccattccagacctaagccttaaaaaggtatagtaacttctactgcttttgtattcttagagaccttaagccaccatgtaagaag

SEQ ID NO: 150 - DNA, 179 bp, Homo sapiens
gactgggcatgtctgggcagagatttccagactctgagcagcctgagatgtcagtaattgtagctgctccaagcctgggttctgtttttyagtgggatttctgttcagatgaacaatccatcctctgcaattttttaaaagcaaaactgcaaatgtttcaggcacagaaaggaggcaaa

SEQ ID NO: 151 - DNA, 179 bp, Homo sapiens
acgggctatgtggggagtattcaggagacagacaactcactcgtcaaatcctccccttcctggccaacaaagctgctgcaaccacagggrtttcttctgttcaggtgagtgtagggtgtagggagattggttcaatgtccaattcttctgtttccctggagatcaggttgccctttttt

SEQ ID NO: 152 - DNA, 179 bp, Homo sapiens
ggagcaggctgaagggtccccaggtggacctggagactctcagggtcgaaaacggcggcagaccagcatgacaggtgcggacatgtgcasggaaggactttgtaagggaccaggattctcagaatccatggtccaagggctgacctgtctggtcctggtccagcatgctccaggtagaa

SEQ ID NO: 153 - DNA, 179 bp, Homo sapiens
tgagccctgactgcaccactgcactccagcctgggcaacagagtgagaccttgtctgtctccctcaaaaagaaaaaaaccaaaagaatgyttccagcagcattattattaacagacccaagctagaaataactgaaatgtccataacagaatagatatgcaaattgtggtatatttata

SEQ ID NO: 154 - DNA, 179 bp, Homo sapiens
actttcctgcttgggcaatggtaagacctgaccctaattactggtctagagcaggggtaggcaaaccatagttccatgcaccagctgccygtttttgtatagaaagttttattggaatgcacgcacacttatttgtttacctgttgcccatggttgtttttgcactgtcgttttaagtg

SEQ ID NO: 155 - DNA, 179 bp, Homo sapiens
atatctccattcaggtcctaatgccccattctttccctatcagaattctgaccctagggtagtaggtctgctgaggctgtgcctttagtstctcttgaagcttcaccccttttacaatcagatcctgggcctgattttcagcacagcctactcttgggccatgagagataagtgtcatt

SEQ ID NO: 156 - DNA, 179 bp, Homo sapiens
aggaaaccgtgtggaacacaccctacaattttctctctggagtactcacctggctatctaggctacttatctaaggacactgtccatcaytgatagggctgcctctagggcctagtccagattgctcctcatggggtggaagaaattcctgtaatggtgaagaaaaccagagggatgaa

SEQ ID NO: 157 - DNA, 179 bp, Homo sapiens
tgcttgccaggtgtgtggccttggtgaagtcattcatctctttctagttctggagagctgagatagtaatgccagctatgccccccttamaggattaatgagcatcagaagagttatgcagtaggaaagctctttgaagatgattgtgttctgtgtgggcatgtggctatggtcactta

SEQ ID NO: 158 - DNA, 179 bp, Homo sapiens
caaatgcaacataagttaaaagaagcattggcttcctagtcaccccaaagacattgtctccaataaatagtgaaattgaacattcctgcwattgtatcccaatatgaacctcaacacattttaaaatattattcagtgttattgcatttcagggccattgtaagacaataggtatgact

SEQ ID NO: 159 - DNA, 179 bp, Homo sapiens
ctaaagccaagaacctagactcctctatcttcctcatatggttccctagactcctctatcttacatacaggggcatctcaatggtgacargctggacaggagaactgctaccatttgtaaaaacatgcaggtgacatagcatttccactaagcaccctccagctagcaacttccattta

SEQ ID NO: 160 - DNA, 179 bp, Homo sapiens
ttccacattatggtgcttctcaaagtagccaggaagttgacattcaagagaaaactattgtttcaatacaatacagatctttaatcaaakgtatccacaaaattcctctgtcaaccactggagaaaagcataatatcagatttaggtagagattaaggagataaaagcttaaaggtgaa

SEQ ID NO: 161 - DNA, 179 bp, Homo sapiens
aaaaagaattgacatgctcctggaaaaaaaataagcaaacacaattgaaaattttttgtgtctctccttgttctatctcaaagacatagyggagctaggatagatccaaaaaaggatactgaacttcagtaaacagaaatcgagtagtattatatgcaaaacacagtgctaggcattaa

SEQ ID NO: 162 - DNA, 179 bp, Homo sapiens
  misc_feature (90)..(90): n = -/C/T
gtatcatttttcatctatattgcttgaaagaaatacattaatcgtgggaattttgtttagatactctgattgactgtatcagaggaagangacggaatgcacccttgatgtgcgaaaatgaggaactgatgagacaacacagatggaaatattcatcaggtagttggagatttggacct

SEQ ID NO: 163 - DNA, 179 bp, Homo sapiens
actgttcatgtcatttgccaattttttaatgtggttatttgttttttgtttgtttaattgtttgcattcctataaatcaagaaagatctycctaatttgaaagtaaacagtgatactaaaatttgtaagcctagtcaaatgtgggctattcaacaggtgtgatgtccttcataggtatt

SEQ ID NO: 164 - DNA, 179 bp, Homo sapiens
cctcaggtgattcgcctgcctcagcctcccaaagtgctgggattacaggcgtgagccaccgcacccagcttattttgttattcttgattsataagtattttgactctcatacatgtttactttttgacatattttctttcttagaatttcttggtcttattttattaatatgctatctc

SEQ ID NO: 165 - DNA, 179 bp, Homo sapiens
tgagtcctcccactagggccaatgacagttggcagtgacatattaaaacaattatgtctgttgcattctgtttttcattgcctaattctycactttgtactgcaaaactacattcctcaggacttgaaagagagaccacaaaatgtcacaccctagttctctaatgttcaaaactaaga

SEQ ID NO: 166 - DNA, 179 bp, Homo sapiens
accttgcatcatccttttattatggcacactagaatactcagcgtaggtatatgctgaaggggcaaagagcaaggacattccagtagcayagcacatctagaacccagatctcagtttcaaagtaccattattcactaagagtacacatgaatttttggagacgtggctgattccgagt

SEQ ID NO: 167 - DNA, 179 bp, Homo sapiens
ctttaagttatgggtacgcaaaggcagacagagtggtataatggccattggagactcagaagagggagggtaagaggagggcgagggaaraaaattacatattgattaccacatacactgttcaggtggcaggtacactaaaatctcagatttcaccactatacaattcatccatgtaa

SEQ ID NO: 168 - DNA, 179 bp, Homo sapiens
ggattacaggtgtgagccaccgtgcccggcgacaattttattttaagctgcaataagcctactcttcccaccagaagctttctgcctttrccctactgtttttccccacatcacttatttattgtgatgttcatttatttatgtttattagtgtctccttacacatctgtatcccttct

SEQ ID NO: 169 - DNA, 179 bp, Homo sapiens
aacattttctgtgtagcatttttataagtagaaaaaaaatccaaattgagaagcatgggtcagcaaaagatctggataaagtactcatgytaatttaaccaaaaatgctctttacttttactctcaaaatgtgttgtgcattgctttaattcagaaaattcagaaagaaacaacagaaa

SEQ ID NO: 170 - DNA, 179 bp, Homo sapiens
ataggattcgtagttgttactattctcagaaagatcacagcactgtgctgtttttctccaaccactaaagatagttgttttattattttstttagttgtttaattgttcactatggaaagttagagctggtcttggatactttgtttttaaccaaactttgataaaggattttttccag

SEQ ID NO: 171 - DNA, 179 bp, Homo sapiens
tgagatgaacttgccttataaagtcatttatcacaaccctaagttgcataaatgtaatgataaaaggtccattaccaaatttgcacttgsaaatcatttcaagataccctccctttgtggagcggggaataaacttacatgccaacaaaatatatgagatatagaataatcttcagaaa

SEQ ID NO: 172 - DNA, 179 bp, Homo sapiens
gtagacatttgtcaggatccatcaagctctatccttgaaatctgtgcattttactacatgtaattatggcttaaaaatatagtaaaaaarttttcaaactcctgttctcccaaccatactttctcttcatttatcaaaggcttcaacaacctctaaactattttttttaatactttaca

SEQ ID NO: 173 - DNA, 179 bp, Homo sapiens
gacacaattttcacttacactgccacctcttaaagctctagtgtattgttatcctcacctagctggacattctgcagctgctctgcaaaratactctccatccttccctaccttgctcagtgccacagagagctagctttgtgggctgcatccagaatgcccctgaccttagtcttcta

SEQ ID NO: 174 - DNA, 179 bp, Homo sapiens
catccttccctaccttgctcagtgccacagagagctagctttgtgggctgcatccagaatgcccctgaccttagtcttctagctgcgtcrgccaagtagaggccctgcaaaagatcagagtaaagaagaagaatgaatcttaattttttccttcaagggcccaccagtatctgtatttc

SEQ ID NO: 175 - DNA, 179 bp, Homo sapiens
ttctcccttctgtaatctaaacaacctcccttcctttaaaacactcacattagaggatccaccatccatagctcctgaaaagggaagagratgatgtgaagacgattatcaagctagggtggcgatacgtcctaatatgcctaggacagtccctgtgtaggctgattgtaattatcctg

SEQ ID NO: 176 - DNA, 179 bp, Homo sapiens
tgaaggtagattttaaacaccagtccctctccccactttatctcttttctagctaagcagctccatttctttcagttgtttttcacgtgycactgtttccaaatatttcttgtaattttctttttctctgaagctgttcccatatcttgtgacacttggtctggggttggaagagcaca

SEQ ID NO: 177 - DNA, 179 bp, Homo sapiens
ttgagttgcctaataaggtaattctccattgccaaaatattccagcaaagcctgtatggccactgtgaagattcatggatgagtggatcrttggtctagagcctctaagttcttcccaactctgagatgttatgaatggacaagcaattattttgaaaaggaaaaaaaaaagaatgtaa

SEQ ID NO: 178 - DNA, 179 bp, Homo sapiens
gattcgggcagggacacaaatccaagccatatcactaaccttatctaaatactggccaataggataagcaaaatcatttttatagcttcyttcaaaaaatcttatgtattaaaatgttgaaatgtataagaatttcatcaaaataagaacctcaccagatctgacccaagggagagaag

SEQ ID NO: 179 - DNA, 179 bp, Homo sapiens
tcctggccattcccctggccttcattgcgggaattctctttgccaccctcagctgtctgcacatctggtgagacggggcacaccgggtgkaccggctttctgaaacatgggcatattctccgccacctgccccctactctcctcttatcccaggccggcgtcaggaggaggaacgcgca

SEQ ID NO: 180 - DNA, 179 bp, Homo sapiens
taagacattcatgagggatctacccgctgtgatccaattatccccactcggccccacctccaacactggggactacatttcaaaatgagrgtcagggggacaaaaaacccaaatcattatcagtgatcattgttcatttatttgtttcaaactctcaaccaaatttaagtaaatgggtc

SEQ ID NO: 181 - DNA, 179 bp, Homo sapiens
ccaaatcattatcagtgatcattgttcatttatttgtttcaaactctcaaccaaatttaagtaaatgggtcagtattttatcttttcatwcatgtacaagacagaccttatttggtaacagcaacaatcctcacacatctctcttccttccttccaggattttaatgccttttgtaaag

SEQ ID NO: 182 - DNA, 179 bp, Homo sapiens
tagttactaaaatttacacatcttaaaagtgtgtaaatgcttaaatttcagaattaccatcagaacctcaattgacattcctttgaatasgctaataagtgacaaataagattaataagatttttcaaaatcgccaggactggtgaatataaatgatgattgaactggaataatattgg

SEQ ID NO: 183 - DNA, 179 bp, Homo sapiens
ctgacctcacttcctgccttcaatatgatcaccaatccatttttctcttaaaaaaaacgtgattataccaagactaccctgtcatttccytgcttaaaactatcaattgtatgtgattgccctgagaataatattccaagttcttgagcagcatatgcaaggccttcgccatcaacccg

SEQ ID NO: 184 - DNA, 179 bp, Homo sapiens
gcttacagaatttttacagggttacatgttactttaagaaacttaaaaaaatagtaagtagagctgcaaagaaaaattaccacaatgaaygtaatttatcacaaatcaggatttggtacacttcttcccttcaagttgtgtatgtgtgcagggaagacaggggaagaagttgacagagg

SEQ ID NO: 185 - DNA, 179 bp, Homo sapiens
ctccaatcacatggccttcagccttcccagtttcgcttttggacaacccaaatccctagtgaaaggggcatggaatctgaacaggagtgsaggaaattgaagtcagctaaagacttttctttttatccacaaaggaaagttgcttttgtcttactgaatgaataggaccctaggagtgg

SEQ ID NO: 186 - DNA, 179 bp, Homo sapiens
caactagatgaaaagtaataatttgttttaccacttgaccataatttttctgaaaattgctaagctcaagctttatagtaaatattttcrgtcttgagttaggtagggctgtaatttttacttttattattgatataaatctatccagatgaaaaatgagccaaatatttatttacctc

SEQ ID NO: 187 - DNA, 179 bp, Homo sapiens
attttaacctgtgccccttcaagtgtactccagctttttttttaaaataatttcaagtgatactttgacttttgactgcatatggaagcrtaagtaacatgtcctttcatttttggataatgagtttcctgattaattacagctcaagagtaaaatgactgattactatttaattcatt

SEQ ID NO: 188 - DNA, 179 bp, Homo sapiens
ctaggaggacacggaaaaggggattggggtcctgagattgggtctgttgggcccaggacgcgttttctggatgggtctaggatgctcccytgtcgcgggacccccgcggtccggccctgcctgctgggggttcgaagaggtggagtgcagggtggaggtgttatttacccgagtcctgg

SEQ ID NO: 189 - DNA, 179 bp, Homo sapiens
aagtagccagtctagttgagcagaaaagagttcagatgtaattgcatcatggtccagatgtgaaatgaagacaatgcgaagtggcattgkggatcgaaacatacatgcacaaaatgacagaattttagaatttgaagggatcatcatggttaccaggctggcctccaattcctcttttg

SEQ ID NO: 190 - DNA, 179 bp, Homo sapiens
attcttaaatatgcacagacacaaatttttctttaacagtcaagaaaatgcacgcaggtgataatcagatcagttttggttatagtacaraggtttaatgcctccgtgatccctttcaacttgaaagcattctagagcaattggtgattaatatcagtataacagtcatttataaaatt

SEQ ID NO: 191 - DNA, 179 bp, Homo sapiens
gtgcaatggggcaaatcaagggggtttgtgcaagtgggagtgagacaggagatggggtgcttcttccagcactccctataggctgactgrgtgacaaagatcattttactgacacctccaatggccctatgagatgggtactattattattatcaccatcatattccttttgcagataa

SEQ ID NO: 192 - DNA, 179 bp, Homo sapiens
acactgggtgagcagcttatggtgattccagacatgatctctgttgggagtgacaggtctgagcttctaggatcagaccctagatcttgrcaagtggtttgaggaaagagaaggaccaatgtaaaaccccaggcttcaaggaatgtggatgctgggcagggaggattaagccccaaaga

SEQ ID NO: 193 - DNA, 179 bp, Homo sapiens
aatgccaaaatataccatctgctgctgtttggcattgcccttaagtccagagtgtggaggctgggggtgggtctctggctacaggagaastcccctggcaagggaggggtgaaaggagtgcctgttgaaccccccatctatccccgcactatggcaagattgagaggaatgactagatc

SEQ ID NO: 194 - DNA, 179 bp, Homo sapiens
ttggcattgcccttaagtccagagtgtggaggctgggggtgggtctctggctacaggagaagtcccctggcaagggaggggtgaaaggastgcctgttgaaccccccatctatccccgcactatggcaagattgagaggaatgactagatcagggaatggcccgaaagaaaaatccaaa

SEQ ID NO: 195 - DNA, 179 bp, Homo sapiens
gacaattacctttggttattgtcaggttagtatgagacttacaagaaaagcactgctcagacgcaattaccattcaagataagaaataakaggaaaggctagcacacttagctttttatttaaaaaagtgttaggtaggctgagcacggtggctcactcctgtaatcccagcactttgg

SEQ ID NO: 196 - DNA, 179 bp, Homo sapiens
acaaatattaatttactacctactacattccagggagcttagagtctagtatcagaaataataaccacacacacacatacacacacactmcattaaataaggatgtgataggctagatgaaataaataaataaataaaaggtccaggtgagaaaagaaggtgggggctagaaagaagtc

SEQ ID NO: 197 - DNA, 179 bp, Homo sapiens
agtatccatgctatcgctggcccttctgtggcctatttttatactgttcactgttcagtgtcacttgtttggtaacactcaacatcaacrtgtgctaccaaattgacaccagaggacaaaaaagaatcaagatatgtacagcctgctttgtactgagccagctgccactagatgttttt

SEQ ID NO: 198 - DNA, 179 bp, Homo sapiens
tttcagcaggggctgcaagagcactgcagccttttccccagaggtgtcagtttggcccagtaaagattgcccctgagaaaacacatgggyaattagagcaaagttcctatgttctggtaacatttaattgtgctatttctcaacctcctctgcacccacacactcacacacaacattta

SEQ ID NO: 199 - DNA, 179 bp, Homo sapiens
agcaaagttcctatgttctggtaacatttaattgtgctatttctcaacctcctctgcacccacacactcacacacaacatttattccacygacttcaaaggaagctcaacgtgttaaaaatatgtgtgggaacaaagaagggagtttgaaattggtctaaactctgtataactgggttt

SEQ ID NO: 200 - DNA, 179 bp, Homo sapiens
ctgattctgaaatggggccggagaatctgcattttaacaagcaccttcaccaggtgatccttttgctgagaacccctgagaaatgagaamcctgtgctagtgctgaatggagcattatattccagagttgaagtttggtgatcagttttccagatggagctggtccttggtgcatacct

SEQ ID NO: 201 - DNA, 179 bp, Homo sapiens
atctgatagacattcattgcatacatttttctgtaaacatgaaaactgaattgtctaatagaaaagggcaaggaagtagaaaataagaartcatcatcagaagtggtttgttttggaattatattgtccagctgcataacaaatcacccccaaaattgagtcgcttagaacaacaaaca

SEQ ID NO: 202 - DNA, 179 bp, Homo sapiens
gatttaatttaatggttctgctcagggtctctcgggggctgcaatccaggtctcaggctgggatcctttcaaggctgagctggggaaagwtccatgtctaagctcactcacatggccgatggcgggattcagttcctcttaggctgtcagactgagggcctccgtgtctcagtggtttt

SEQ ID NO: 203 - DNA, 179 bp, Homo sapiens
ctttccacatgggcctctccacagggcaactcacaacatggcagctggtttccagtagagcaagcgagtgagagaacaagaaaggcaagsaaggtgaatgtcccagtcttttgtaacctcatctcagaagtgttaacccatcacttttgccatgttttattatttagaagcaaatcact

SEQ ID NO: 204 - DNA, 179 bp, Homo sapiens
tgtgggaggaatagctcaacctcatctgaggcatcccactctaagaaactaatggcacctacacctcttgggcattgagtttttaagccmatttttaattcttgttctgctcatattctaagtgagcacataaagtgctgctccaagcaagaccagcccttgtagaagggcaagtgcag

SEQ ID NO: 205 - DNA, 179 bp, Homo sapiens
tctgaggcatcccactctaagaaactaatggcacctacacctcttgggcattgagtttttaagcccatttttaattcttgttctgctcawattctaagtgagcacataaagtgctgctccaagcaagaccagcccttgtagaagggcaagtgcagtcagtcccctaggaaacgggactg

SEQ ID NO: 206 - DNA, 179 bp, Homo sapiens
tctcatatgtgactctattgctttaagaatccctttagctttaaatatctatgaatctgctgaagcagctgtgctttgattgatgtggawctctgaactcccttaaatacaaagaccaattatttagccgagctttgttggattcagtgcattctgaatacatgtcaaaatatacttgg

SEQ ID NO: 207 - DNA, 179 bp, Homo sapiens
acttaaagtggaaacattaacaagagtaattctttgaatcatcaaactgggaatattttaggaagcatatctatctgggtgaaaactaarcaaataagacaattgtaaaggcttgtgatctcaggaatacaaaggcaaaaatgcgcagacttgaaatatgacaagttctagttttgtca

SEQ ID NO: 208 - DNA, 179 bp, Homo sapiens
tgttcacaactcttcccctcctaggaaaagaatctcaaggcagacctgcttcgggtctgctctgtaaagaggtaggaatcctctgctccyggtaaattgcttcctaaccttctttggtaatagactattttttaataaaggtgatggatcatttcccattatacactcaaaatgtgtgt

SEQ ID NO: 209 - DNA, 179 bp, Homo sapiens
aaatgtttaccctgtgtctagatccaaatgggtgaagaaaaatgagtgacaatacatctacttaagctcacttacataattgtggccatrccgtttttttcacattacattattagaacattggacaataagtcaagaaacagaatgttctacaaaataaactttaaaaattggtaagc

SEQ ID NO: 210 - DNA, 179 bp, Homo sapiens
tgcattaaatcccctcctatagctgtcactgccaagcagttgcactggctctgtcctacctttctgttggtaattctgtttttaatcctrtgcttcagtgtagtttatataaatctttacagagggataaaacttcctgtaattaattgtttgggtgaacatgtacctgggagagctat

SEQ ID NO: 211 - DNA, 179 bp, Homo sapiens
gattgtggctacactcccctgctcccacatcttccatagaccccactgtctgtaaaataatattcagtctggcctcaacctgtctttccrgcctcggtgacacaggtctattctgcctgagacacttactatgacacccttgcttgttcctggggctttgacacatttccaacgtccca

SEQ ID NO: 212 - DNA, 179 bp, Homo sapiens
agcctcggtgacacaggtctattctgcctgagacacttactatgacacccttgcttgttcctggggctttgacacatttccaacgtcccwttgttcttcctctccaaatcagccaattgcccaagccctgctcaaatctcccacctcatgaagccttcttgatgcctcccagcacacca

SEQ ID NO: 213 - DNA, 179 bp, Homo sapiens
ttggctgagatatgaacatattgttgaaaggtaatttgagagaaatatgaagaactgaggaggaaaaaaaaaaaaaagaaaagaaccaamaacctcaactgcctactccaaaatgttggtcattttatgttaagggaagaattccagggtatggccatggagtgtacaagtatgtgggc

SEQ ID NO: 214 - DNA, 179 bp, Homo sapiens
ctactccaaaatgttggtcattttatgttaagggaagaattccagggtatggccatggagtgtacaagtatgtgggcagattttcagcamactcttttcccactgtttaaggagttagtggattactgccattcacttcataatccagtaggatccagtgatccttacaagttagaaaa

SEQ ID NO: 215 - DNA, 179 bp, Homo sapiens
ccaaggaggggctgtaaaatggaggccattgtgtgagcctatcagagttgctgcaaacctgacccctgctcagtaaagcacttgcaaccrtctgttatgctgtgacacatggcccctccccctgccaggagctttggacctaatccaagcatccctttgcccagaaagaagatggggga

SEQ ID NO: 216 - DNA, 179 bp, Homo sapiens
cctgctcagtaaagcacttgcaaccgtctgttatgctgtgacacatggcccctccccctgccaggagctttggacctaatccaagcatcyctttgcccagaaagaagatgggggaggaggcagtaataaaaagattgaagtattttgctggaataagttcaaattcttctgaactcaaa

SEQ ID NO: 217 - DNA, 179 bp, Homo sapiens
aactgattagatgaggcccacccagattagggagggcaatctgccttactccgtctatcagtttaaatgttaatcttatccaaaagcacyctcaaagaaacgttcagaataatatgtgaccaaacatatggacaccccatgacccagtcaagttgacacaaaaagtcaatcatcacagc

SEQ ID NO: 218 - DNA, 179 bp, Homo sapiens
atggctttggacaacttttattccatattggtaataaatagcttcatacatcacacatttagcctgtagtcctagcagtttggaagcccraggctgagactgggggatcaattgaggccaggagttcagaccagccttgacaacgtagtgagaccatcagaaaaaagaaaagaaaggaa

SEQ ID NO: 219 - DNA, 179 bp, Homo sapiens
aagcattctatgttttaatttataatccatatttttaacattgggtggaggggagaagtaaagagagacactcttaacacagaaggctgwaatcataaaataaaaaggtcatggcaataaacacacaaaatatcaaacttctatatgtcaaaaacagtagaaacaaatacaaacaaatg

SEQ ID NO: 220 - DNA, 179 bp, Homo sapiens
aaaacagtagaaacaaatacaaacaaatgataaagactgataacagaaagcatttgaatgcatagcattataatatacctaaaaataaamagagctttcataaattaagaaaaagatgaataataagccaagatagttcacaaaaagaagtacacaacaattatgcaaaaacttatact

SEQ ID NO: 221 - DNA, 179 bp, Homo sapiens
aatttatacaagatttcaaaatagatattgatggtcccattttacaaataaggtttaaagggttttagaaagtcacccattcaccatcaytaataagttttggagctattgtctaatccaggggtgtctgtcctcaaagctctgttccttacattcatctatcctcctgctctgtgcgg

SEQ ID NO: 222 - DNA, 179 bp, Homo sapiens
atcaaagaactagaactaacaactacacatttgttccttctctttcccatccacctgtacccctgcatccatatgaggtaaccattctcytaaattttgttatttattatctttttgcctattaaaaaattttaaatacaatctcccaggggaaaaaaaaaacctatttagttttagtt

SEQ ID NO: 223 - DNA, 179 bp, Homo sapiens
tcattcattttcagtgctatatatttgtctgttccatgaacatatccatttttatccagctgcctcttgagggggacatggtatgccaawggtgctgctataatcatacttctgcatgtccactgggagggtttgtgggcataaattcctctagggattatcattaggactgaattgtt

SEQ ID NO: 224 - DNA, 179 bp, Homo sapiens
cttcaattttgctaatcaagtgggtgtgaaatagtatcttattttagtcttgatttatacctttctgattaccaatgaggttaagcgtcycttcactggtttttggtcatatgagcttcttctgtgaaatgacatgtcattcagcaagggttttttaaaaatgattttttttttcactg

SEQ ID NO: 225 - DNA, 179 bp, Homo sapiens
agtcataggaattcttaccgattcttaatgttttcattttatttttacatatgtttcaaatatttttctcaatttgtatccttattttcrctttcattattaaaatgtctattagtgaacacaagtattttgactttagtgttcatatttatccattttttatttttagtactttttat

SEQ ID NO: 226 - DNA, 179 bp, Homo sapiens
tttaactagcattactgtggtttaagagtttaaatatcttaggtttttctagcataaaaatattttgcaatatgttcaatcacattaaakatttgcttttaacatttaagtccttaatccagttacatggagttgatttgtttgtgttgcatgatgtaggaatccaatttcattttttt

SEQ ID NO: 227 - DNA, 179 bp, Homo sapiens
aaatgttcttcacatttctttaaatattttcctcttttaatttttataatttttccttcagggactctaagtatctaaaacctggtactyctattatctctggctatgaacttttacattttctatcattctagaagcattcttccatctggtctttcaactccatcattctttagctg

SEQ ID NO: 228 - DNA, 179 bp, Homo sapiens
cagtgattgtgttgtttgtctcgttgcctttcatattgcctgctaaataataatagcctttatttattgagcacataccacatacaagasaatgtgctaagcattttgcaaatattactgacaacagccctatgtgctatgtattattatctaggtcaagtagatactattgctctgtt

SEQ ID NO: 229 - DNA, 179 bp, Homo sapiens
gccccacaatggcagcaccagcagagcctccatccttaaagaatagtacagctttgaacactgagcatgtcagctatgatctttggggaycaaataacagggcattcacatggcaccaagaggagaaccatccagacaaagcttgaccttcgcaccagtgaggccgattggaggcttgg

SEQ ID NO: 230 - DNA, 179 bp, Homo sapiens
tttgaccaaagatgccacatgttcaaatactcaaatcaactagctaacctgacacaataagagcagtgaaatcccaggcaacagcatgcrcgaaacggccactcaaagcagatgtatcagtattctggtgaaagtttcagctaaacttctgatcagaagttgagccacaggattctctg

SEQ ID NO: 231 - DNA, 179 bp, Homo sapiens
ctaaagacccagatgtatctgagggtgaaaagcaggtattgttttagtactagttttggtagcaagtgaagagcacataaaattttcttrgttgttccaaaatgtccaccactttgtaataagaacaaagtctgcacagatctaaaaggaaaattctaattttagcagatttgaagccc

SEQ ID NO: 232 - DNA, 179 bp, Homo sapiens
acagaggccgagcatggtggctcatgcctataatcccagctactcggtaggctgaggaatgaggatcacttaaacccgggaagcataggytgttgtgagccaagatcgtgccactgtactccagcctgggggacagagcaagaccctgtctgaaaaaaaaaaaaaaaagactacacata

SEQ ID NO: 233 - DNA, 179 bp, Homo sapiens
ctacagagtttaacaaactttttctagaccagatagcaaatattttttaggctttgcaggtcatatggtctttgtcacaatgagtgaacrttgccattttggcactaaagcaaccagagataataggtgaatgaatgggcatggctgtgttccaattaaactgttttattgggggaaaa

SEQ ID NO: 234 - DNA, 179 bp, Homo sapiens
cttcttttaagtttgaccccaaaagaagaatgaagtttcttgaaactcctgcatccactgacaggaattggattcttactcaatgtatckgaaattagacctttgtaacacctggttttcttgattatagataggccatgttccaggactactatacaatatttggtttgtaggaagta

SEQ ID NO: 235 - DNA, 179 bp, Homo sapiens
atatcagtctgttctcaagctcccagggccactgagttcatatcagatgatctgagttcgaagtccagtataaacaattacctcttctcygtctgtctcagttttctcacctgtaaatggtgatcattatagtctctaatttataagattgcaaggattaaatgagttcattcacataa

SEQ ID NO: 236 - DNA, 179 bp, Homo sapiens
ctacaggcaacaggccagcgccttttaagagatgcagcacctccgttaacaaaactggcaagatggcagtattgtaaggtcaaggcccarttagcataggtggcacgagtgttgagctaaaaatgcataaatccctaagacttaaacaaagctgaactatataggaagaaacctcagcc

SEQ ID NO: 237 - DNA, 179 bp, Homo sapiens
gaaaagtatctggacccaggttattgcttattttcagtgttttggataaacttccctttcttattatgaatgttgctcttttcaaaatgyatcgccgtacatcacaaataccccatatttattcctcttaccttttatttgtttgttttataaatgcttcctctgcacttgggggaaga

SEQ ID NO: 238 - DNA, 179 bp, Homo sapiens
gatccactttcagttacatgcatatttatttaatgtcttgaattaatattttggtgttggtaacattaatatgatcaaattttgagaacyccattaaaatgctatatacctgaataaaatgtatttgatatttcccccaaataacaattttttttttttttttttttttgagacggagt

SEQ ID NO: 239 - DNA, 179 bp, Homo sapiens
gtggcccacctgccagccccttttacacagattctggagactcaagatgcgtagctccagctggattctatcacaggtactagacattcyttctttctctgctcctctttggtaccacagtatctggccagcgggagtgattgctcccttttttttttttttttaatctgaagtctgtt

SEQ ID NO: 240 - DNA, 179 bp, Homo sapiens
ggccaaatgttttcctgaattcagtgtttttcggatttaagaaaggcaatactgtacagtgaatgcagggcatattacataacactcccygcagcatctgcagcagatcaggttttggtattacatcaatgttgaattttatgaattttggaattgtaaagaagaggctgcagatctgt

SEQ ID NO: 241 - DNA, 179 bp, Homo sapiens
atcttatccaaaaacctcaaggccaaatgttttcctgaattcagtgtttttcggatttaagaaaggcaatactgtacagtgaatgcaggrcatattacataacactccctgcagcatctgcagcagatcaggttttggtattacatcaatgttgaattttatgaattttggaattgtaa

SEQ ID NO: 242 - DNA, 179 bp, Homo sapiens
tattcaacaagaaatagttattgtgatctcacaagagactttctgggataatgagaatgtaaagtattttgttatggaaaatgcccataygaagtctttagtttttacgttctgtggtttagtttttaatttatgtggcttagcttttaattcatgttctcatccacagaaattctgtg

SEQ ID NO: 243 - DNA, 179 bp, Homo sapiens
attattgagcgtttatatagcagcttgctttacaaagtagtttataatttataattacttttataagtaatttataattcataaagatgstttaagctaaatttttattgttatctccatctcttaaatggaaaaacaaaggtagttaactaaagtcatgtaatatgtctaagaccaaa

SEQ ID NO: 244 - DNA, 179 bp, Homo sapiens
actatacaggtattttagtctaatgcaagcatgaaatcagaggggcaaattgtaaagaaggaaacatgtatgcctggtgccatcacctcrtctcatagtacctcatattacctactctttcctcccagtgttgcacctgcctgatgagcaatgcctttgtcatgcttccttggctgacc

SEQ ID NO: 245 - DNA, 179 bp, Homo sapiens
agtttcattcacagaagaaaaaaaccacttactttgaaatttactggcaactcttcaaaatgtatgctgatgtcctaaaggctttgttcktaacttgaaacactgggtaacaaaagtactatttcccttcttctctttatttttcctttcccaacttcctttatttatttccctctctt

SEQ ID NO: 246 - DNA, 179 bp, Homo sapiens
atatgtaagtataaaagtattaaaccatagagttgcagagaaaatcttctaactcctgtagctgcagccatagtgtgtctaatctatcawcatcaatattctgaccccaagagatatcaaacagagttattatcaccttacgtaggctagagagaaaagtctgatcaaaagccttcata

SEQ ID NO: 247 - DNA, 179 bp, Homo sapiens
ttggatcattttcccataaaaaatccctaccacttctgttgatgagagttgaattgcgagtcatagaaacctgtgcatctctgtcacttyttcgtattctgcttcctaccaagtagaatcatagcttgtttctcatatactgcaacctgctccccccaagatgtgactcaagggaaaaa

SEQ ID NO: 248 - DNA, 179 bp, Homo sapiens
ttgtgaatgttgttggtgtattctcgggtcaccacctcgttgatgacagaacggccctttttcttctctccacccttctttgcgggaacmattctgccaggtccaagttggaaaggaagagtgcgagggattccttgtcatccttctctaagtgtacaagagttacaatatcactagta

SEQ ID NO: 249 - DNA, 179 bp, Homo sapiens
ttccttacaagtgaacttgaatgagatgcttaaatttgctgttggtagagttcttttggaaaaaaaaaaaaaaaaaaggtgtatcattgkaactggtgaatactactttagcatattggtgaaaacagagactggatatggcagctatctgagcaacatattatcctaagatgtttaaa

SEQ ID NO: 250 - DNA, 179 bp, Homo sapiens
attaagccttgaccaaagagcaaacaattctcagttccatagtttcatatggagaattttatcaaaaactacttacattttccactttcrtagaatcacaaaattggttattggaatatgaaagccaaatgacacttgaaatttattgtggtcaattccatcaatttccagatgaggag

SEQ ID NO: 251 - DNA, 179 bp, Homo sapiens
ctggaaatgccataccactcttactccttatgaacatgtgaagaatcaacccttgtttgaaggtgacatgtcttttgctatccatttatyccccatccttcaatttttattacaagagagaaaatgagggcaggtatcaaccataccaaattattctatgggatatcctgttttccatt

SEQ ID NO: 252 - DNA, 179 bp, Homo sapiens
tttctacatttactttaaaatctcacttgttttgttgcttactttttcttctctaacttagcaaatgcatatcaatcacctcctatatgwtagacatcatttattccatgtaattttatcagaaataagatcagatctatcttagacatttagcaccaatctacctctttctctttctc

SEQ ID NO: 253 - DNA, 179 bp, Homo sapiens
aataataagtgatcctgactgtttgctacacagcgggttactctacagaatttgcaataaaggctgctcagggccttaggcagcagactscattcccatgaacttagctgctatacaaactgtcagactccatctctcctggaatcaggcacacatatgtagatgaccaggcatttcaa

SEQ ID NO: 254 - DNA, 179 bp, Homo sapiens
tgtttgtcttcattgcaaaaccaaggatagaaaactttgaagtgttttctgttgcttaatgtcacctactgttcctgtcagcaaactgarataaacctgatggactgaggtgtctggtctaattcctttattgacacatagtcctgtcttcaaacaccagtgtaaatgaataagtactg

SEQ ID NO: 255 - DNA, 179 bp, Homo sapiens
atagaaagggctattcacatctaccagctatcttgttgaacttagtgctactttcattgatagcaggattttctgctacttctcttccayactgaggctacaggtactttgccagggctgcctctaaaagacctcatcaactcctagctgctcttgaatgcaatggaaccattctacta

SEQ ID NO: 256 - DNA, 179 bp, Homo sapiens
actcccaacaaactcccactcggtaaccatgctaccatagttaccatagagaacccagtaagaaaaactcacagagcatgaccaacaccrctggacgggatggagtttatctttccttctattatttttattataagaccagaacaccctagtaactaccagcccccgcagcctaaaca

SEQ ID NO: 257 - DNA, 179 bp, Homo sapiens
tttttgcaaataataaaagagaaacttaaaggggtagataatagagccaggcttcacatactggtctgttagattgcaaagctcttgttygggctattctccataagaatgctcaccttagacttttctgcatagaaagaaatgtgggctcaaggacagaaatagaaatggagctgtca

SEQ ID NO: 258 - DNA, 179 bp, Homo sapiens
ggacagaagcgttattccctcacctgctgggaatattgccagctgatggctcttagctggtagcctccctggaattgcccttggctaaaytgctttttctctcaaggttacattccctccgtggggcagccgacatccaatgactggtccatgctggtctctttcttccaactcaggac

SEQ ID NO: 259 - DNA, 179 bp, Homo sapiens
aaggttacattccctccgtggggcagccgacatccaatgactggtccatgctggtctctttcttccaactcaggacaactcagaaaggcrgtcccagttccagcagtccctgtgggtctagccaacgtcttataactgcaccactgctcagtctctcctgctgtttaatattgcttcct

SEQ ID NO: 260 - DNA, 179 bp, Homo sapiens
gcagtccctgtgggtctagccaacgtcttataactgcaccactgctcagtctctcctgctgtttaatattgcttccttctctctcatctygcatagtaatctccatctcagagtcagcctcccgggtgaattcaacctgcaacacagtgctatcctcagtgtctagcatgtagtcagtg

SEQ ID NO: 261 - DNA, 179 bp, Homo sapiens
ctgcaccactgctcagtctctcctgctgtttaatattgcttccttctctctcatcttgcatagtaatctccatctcagagtcagcctccygggtgaattcaacctgcaacacagtgctatcctcagtgtctagcatgtagtcagtgtcaatcaatatttgtagactaaatggtgtattg

SEQ ID NO: 262 - DNA, 179 bp, Homo sapiens
tctctcatcttgcatagtaatctccatctcagagtcagcctcccgggtgaattcaacctgcaacacagtgctatcctcagtgtctagcaygtagtcagtgtcaatcaatatttgtagactaaatggtgtattgtttaggattcttgtgatggcaaacaacagaaacccaattcaaacat

SEQ ID NO: 263 - DNA, 179 bp, Homo sapiens
agtgctatcctcagtgtctagcatgtagtcagtgtcaatcaatatttgtagactaaatggtgtattgtttaggattcttgtgatggcaarcaacagaaacccaattcaaacataggagatgagacactcaagtatctgaagagccagcgcatgtcaatgtcatcaggacttgctctctc

SEQ ID NO: 264 - DNA, 179 bp, Homo sapiens
tagagagctttgaaaaacctaggagaaggtcaaacaggctctaggggcatttatcaacagccaaaggcttggtaaatattgccaatgttygatatttccaccagcacatatactgcaaaggaaatctaaacctcaaagctagggcttgaagctgaaagtgttggattttccaaattcaa

SEQ ID NO: 265 - DNA, 179 bp, Homo sapiens
attcagagggtacatgtgaaggtttgttataagggtatattgcatgatactgaggtttgggcttctattgatcccattacccagacagcraacatggtacccaacaggaagttttctcagcccttgtccccctccctaattctctccagtgtctattgttcctaactttatatctgttt

SEQ ID NO: 266 - DNA, 179 bp, Homo sapiens
aacatcattcctgccctcttggagctgaaatgcaaatgtatgggaagtgggggaggtagggatagacttaggtgaacacctgtcaatatrgctgatttatgtcatggtataggaaagttgtgaaggctgctctgaggaagtattctttaagctgcaattaggaagataagtaggaatta

SEQ ID NO: 267 - DNA, 179 bp, Homo sapiens
tggttcagcttcaatcttctgcatgtgggtagccagttatcctagcaccatttattgaataagatgtcctttttccattgcttttgttcrtttgtttctttgtttgttttatttttatgagacagagtcttgctctgtcacccaggctggagtacagtggcaggatctcagctcactgc

SEQ ID NO: 268 - DNA, 179 bp, Homo sapiens
tgttattaaatgtgtagagagggccagatgccctgctgattgctttacataaactctctccttttatcactacctcaggcctgcaaagtrgatcttaccacttccactttgcagagatggaaactgaggtttggggcaagtgaataatttgctcacacactagagggctagctgggctt

SEQ ID NO: 269 - DNA, 179 bp, Homo sapiens
ctctaaaaaaaaaaaaaaaaaggagttctgaagttgaagtcagaaaagaaaaggtgaggtgctgataatcagtctttagagacataaaasctactcttccttctttgtggccaccaaggtccaaagttgacagtcacttacaaaagcagctatttattttattttattatttttagaga

SEQ ID NO: 270 - DNA, 179 bp, Homo sapiens
gcacattaagacttttgatacattttgcaaactctcccctcccaaaggtttatctagtttgtattcccaaccattagtttatgagatttyctactttctcattagcaataggtaatattattttttaaatatacatttgccaagtcaatgatttaaaaaattatatttaacttgaattc

SEQ ID NO: 271 - DNA, 179 bp, Homo sapiens
tgcgccactacactccagcctgggcaacaagagcaaaactccgtctcaaaaaaaaccataaataaataaataaagtctttcaagcatttrctgaacatctgctgtgttacatactttgctggaaactttcacagatattatctcacctacatgcacaacagttctttgaagcatgtaga

SEQ ID NO: 272 - DNA, 179 bp, Homo sapiens
tttttatagaggaggaaacttaaggcttgggctaacttaggtttcacggtaagccctgccacacaccagctgtgtaatctggggggggarttttcaacctctctgagctcaagaatactaatgagctgaccctcttgaaagttcttgtgtttcttctgtcctataagcttgggtcctaa

SEQ ID NO: 273 - DNA, 179 bp, Homo sapiens
aagttccaaaggacacagcccctctctttttgttcactgctgtgtcgccggtacttaccacatgtccagtctaaagcaagcacccaccaratacattataggactgtaacaatgtgcattgtgtgccttgccatggttttatcaacaccatgatgaaactacattaactcttggacatt

SEQ ID NO: 274 - DNA, 179 bp, Homo sapiens
tgttcccccaaaggactgcattagtaaagtttcactgaacaggttctgactgtgctccaaatagatatttattctgatgggttcagtttwaaaaaaaaaaaagttgcctttgaagacattgcctttgaaactaattttatcaactctatacaacagtcagtcttatgctttcagaggaa

SEQ ID NO: 275 - DNA, 179 bp, Homo sapiens
ctggctccaacaattaattcagagaaagagattcttgaaaaacccaaacattaggtgttacatataatatgaccgataccattttaaatmggttggaattcctaaagacttttcttctccagtgcctacacaaattccattaaaacaagtaacctcattccaaggatataaaccagtgg

SEQ ID NO: 276 - DNA, 179 bp, Homo sapiens
atattacatctgaagaaccctaccataacactttacttacacactttttttaatactgttttcggctttcagtaaacacagttttgtgtyggcattggtgtgggcgtggtttctttggcgagatatcattggtgactgtgtcttgcctcttctgtaggaattgtgcattttgcttgaca

SEQ ID NO: 277 - DNA, 179 bp, Homo sapiens
cctgcttcacaacagacatttcctagagaaagagagagagagaggagaaagagagagaaggagagagacagtagccaagagaaccccacrgacaagatttttcatttcacccaatgttcacatctgcactcaaggtcgctggatgctgatctaatcagtagcttgaaaccacaatttta

SEQ ID NO: 278 - DNA, 179 bp, Homo sapiens
tccatcttacagatgaagaagctgaacccagaaaggtcaaactgtttgcatagaactccatagcccaaggtcttaaccattacaatccamccccctttttttgtattcagaatggcggttagggctaacagtctctcaggacttattcttcagtactttggccaaataactgtctccac

SEQ ID NO: 279 - DNA, 179 bp, Homo sapiens
ggtagctaagaactaagattgagcatgtaaagtctcctgatttccgtcaacatgaacagctcttgttgcagggctaacaccaccagtcargctcatggcagacataattcacaataataccctcaaagtattcccttcaggggaagcaatacttggggatatctaccaaagtataaacc

SEQ ID NO: 280 - DNA, 179 bp, Homo sapiens
tttgtttgtttgtttggaggcttgaagacattgctatactcagcttctttttgtcctcaccacctcctcccttgattcctttccttcaaytcttccttccttcccccagattcataaacctgagtgtttccattgttgctggaatcataacctttgggttttccaattaaccagggtgt

SEQ ID NO: 281 - DNA, 179 bp, Homo sapiens
tcaatcttggcttattgatgaaagcaggtcctgaacattctcaaattcctctcaggcctcatcacattgtaaagaaattccaactcaagkatccaaatttcaggtcagtcatgataaatgctctggatgtaatctctgtgtttattttggttatggctcagtttctttcttttttctct

SEQ ID NO: 282 - DNA, 179 bp, Homo sapiens
acctatctccagccaagtcatgattaactttcagggttggtaaatgggctatacttaagtatcaagtcttctgatgagatgagtccacarctcggcttcagaaagttgcatattaagagtggtcagttatattgcaactatcctaaaccgaaatgagtctcttaggtaacagtaaattc

SEQ ID NO: 283 - DNA, 179 bp, Homo sapiens
cagcaagttgggaaggtggctataattcaggtcttctgactcacaaagcagtgctcattctgacagatggccccaggctttccatttcaygcaaccctacatgctcagccaacatgaaaaggtagcaaaccttgactcttatggatgagtgggtggatgagtagatggatggatgggag

SEQ ID NO: 284 - DNA, 179 bp, Homo sapiens
gttatcgccaaccagccactaaggcctgattccacccacatctccagcttctccccacaccctggtcggagccaccatctcctgtttcaraccccatgacagcctttcaatgggtctctggtgccaactaaatagtcctgtgctatcatagcacagtgactgcttccaaataaagaact

SEQ ID NO: 285 - DNA, 179 bp, Homo sapiens
ctcccaaaatgctgagattacaggtgtgagccacagtgccaggcttcacaatttcaattaagcaatttataattacttgtataatgtccracctgcttgcaaccgtatgagcttcacaagggcaggcctgtggcaagcacatgttcattgagcacttgtaggtgccagacactgttcta

SEQ ID NO: 286 - DNA, 179 bp, Homo sapiens
taggacattcttaacctcctgctcatgcctaaagaggcagacatatttgcaggcatctggtctccagtccatccggcagcagacgtgccrggagtcacgccagggggcctgttggagtgatattgttcaggcctttgagattcaaggagtttggattggcttcaggtaagtctggaagt

SEQ ID NO: 287 - DNA, 179 bp, Homo sapiens
ttggtgcagagatgtcaaaaaatcatacacatcatatgttatctcagggttgactcagaaagtagtagctgttttgctctaaaagacacyaattttaatctacaaagtggcctgttgaacctcacagcctcagtggtcaacacaagcctttgtgaatccagtgcccagtgcctagccct

SEQ ID NO: 288 - DNA, 179 bp, Homo sapiens
ttcccagagaagactgcctctctaggtgagagcttgagaagacagatacagaagggatggggtaggctaaagtttacatctgtggtctgyagaatcaatcaggatgaagttcacctttgcaatttaaaaattttcataagtagtgacaagttgcttaacctttccaagcctcattttta

SEQ ID NO: 289 - DNA, 179 bp, Homo sapiens
gggctaagctaaagaaagaattttctggtggcccttcttgtgagccagaatagaagtgtttggcacaggtggtgtggtggagttcagctygatagaaccattgcttggtgtgagctgtagatggtatggtggggagactgcagcctttggggacagagagatgcgggtttgaatctcat

SEQ ID NO: 290 - DNA, 179 bp, Homo sapiens
taatgaatgtccccagttcaaagggctgttgatagaagaaacgggttaatgagttaaccatgaaaagactcagaaaggtacatggcacasagtaaatgctcaacaaatggcaaccatcgtcattactgttattgttttgggcagagagaatagagggagggaaaaaagagagggaaaga

SEQ ID NO: 291 - DNA, 179 bp, Homo sapiens
ggacttggcctttccagagagcaattttgcaatttggctgtactggaacggagaattccacggagtccattgatacattctcttgtaaaytctctcagccaacattttttggaggttattttctttaattaaaaagaaaaactgttcctattaaaaatataaaaccaaaagagatttcc

SEQ ID NO: 292 - DNA, 179 bp, Homo sapiens
cagaaagatcaacatgacatgactcacttataggtgtaatctaaaatagtcaaacctgtagcagtggagaggagaatggtggttgccagkagctggggagaagggcaatggggagatataggtcaaaggcatttgttattcaagaggcagttattcaagaggcataattcctggagagc

SEQ ID NO: 293 - DNA, 179 bp, Homo sapiens
cccacctcccagcctgccccaccgcagtctcagaagtaaatgtcgaagatggtgaggctgtgacaccagaatttagtgaggatctcagcrtgagaattagtgctcagtccatgatgtccatgctccaccaagaactcagaacaaaaaattgccccaaggaaagaagaaaagggtgaatt

SEQ ID NO: 294 - DNA, 179 bp, Homo sapiens
aaaacctttcctgagagaaaatgacaggacaccagcttccggcggccctaagcagcagctgctcttttcaaaatgtgcagaagtgcaggytttccccaaagccccccatcctgtcccgggatcctgctgctccagacagcacttcacaggggccaagcatctgggcatcctggcccttc

SEQ ID NO: 295 - DNA, 179 bp, Homo sapiens
gccctcctcctccacctccaaggaggttgcctttggcctctcactgaacccctcatgcccccttgccctgcatgctggctgcggcccccrcccatggtccaccttgtcaaagtttctctgcttcttgtccagggctgcagcagcagcattggagcgctctacgtccaccatcaagtcct

SEQ ID NO: 296 - DNA, 179 bp, Homo sapiens
cctcagggctattgagctcccactttcatgcactgggaaaaaaagtcacctggttttccttcagtttcttctgtagttgaagggccagcrcctgctcatcctcaatcttactgttctgctgattaatgtcaaactccttcctgcaggagaagggtgggggtgggggagtgacaggtagc

SEQ ID NO: 297 - DNA, 179 bp, Homo sapiens
agtttatatcctcccagctgggatattagtggtaatggaaactaccacttatagaatgtctactctgtttggtttttctattctcataakaacttcaaatatgttaaaaattatgtaggggtttacatataagaatgtctataataagtatgtaagttatgcagcatgaaagcaaaatg

SEQ ID NO: 298 - DNA, 179 bp, Homo sapiens
aaattgcatcatactgtatgtatccttccaagatttgcctttgtttactaacaatatgctttaatgttcaaacatattgtatcatgtagytggagttcacatcttttcactgttttataatattccactgaatgactgtaatactatttacccattcccctgtggatggaaattcaagt

SEQ ID NO: 299 - DNA, 179 bp, Homo sapiens
aaggttgataaggaagccagaattaggcttctgcctcctaaactcctctctgctccactcaacatggccacctgccctgcaaccacccartggggctctagactcaccttggtgtggccaaacttgtactggttgtgatcaatgtccagagagctgagcagcttctctgtccccttcct

SEQ ID NO: 300 - DNA, 179 bp, Homo sapiens
ggaggcaagaaaaagggctcatccttccagacggtgtcggctctccaccgggtaagaagggcccaggggtgccaggacacctggtggaayggcccagcccagagacttctggctgcaccacctattctgatgcttgagtttgatgaggaaagaagctagggctacgtagtcgtttttta

SEQ ID NO: 301 - DNA, 179 bp, Homo sapiens
ggccttggggaacatgcactcctcctccaggatggacatgatgcccatgggctgagggcagggtgaagaggcaaagagagaatcactgarcacactcccaggcttccacagtcccataccctgacaggaaaaggaatctggagccagtagcgctggcctgctgaaggggcgctgtgctg

SEQ ID NO: 302 - DNA, 179 bp, Homo sapiens
gaggttccactaggaggtccctgcacagtgtgtgagggtggcatcctctgcccggcttcacttatactcaactgagacaccaaagaggtygtttacatttccagaaccatccagggcttctgggctgaacagagggccaggatttcactctgtccttcccgccagttccctcactctgt

SEQ ID NO: 303 - DNA, 179 bp, Homo sapiens
tcccctgggggccacagagaccaatcaaaactcaggattcctactgttctccatacagggctcagcatcacatgctccccttcccagccyggccatcagagcccagcacccagcaggatttgcctgacatggttcattgctctggcacccctctaatgagagctcagtgccccatgctc

SEQ ID NO: 304 - DNA, 179 bp, Homo sapiens
gtcagcatgtactgataggcgttgtcggagatggagaagatgtggggcggggcctcactcctcttcttgccccggtaggcggccaccacytcggcattgtacaccggcagccacttgtaggggttgacagtgacacagaagaggcccgagtaggtctggagcaggagacaaggctgggc

SEQ ID NO: 305 - DNA, 179 bp, Homo sapiens
tggcccacagtcccaggcctgcctaagcaacccagctgtggcaggaactccaaaggggctgaacttgtttagttggaggagacttactcyttcctccacctcctggccctctcgggagccatcccttccctccctctccccagagtcctgttcacacataaccttccccagcccctcat

SEQ ID NO: 306 - DNA, 179 bp, Homo sapiens
aaggcctcctaggccaggcctttgaatttgcccccactcccctgcatttccacctcccctagtccagaccccatccccgggtcctcaggkcagtgaagaagagtctggagtcaggatctcggcttcaaggaaaattgctttattctgcttcctcccaaggagctgttacacaggctcca

SEQ ID NO: 307 - DNA, 179 bp, Homo sapiens
cctggaaacacatgtgctgctgccacaggggcttccacctgcccacaaagcaggccccccaccatcagacccctctcacctttgttcccrtgccctgtccctgcccaataccatctctccaaggactgattggactttgtttcctttcaaaagggcttgaatgaggagtagctttgcca

SEQ ID NO: 308 - DNA, 179 bp, Homo sapiens
aagtccaatcagtccttggagagatggtattgggcagggacagggcatgggaacaaaggtgagaggggtctgatggtggggggcctgctktgtgggcaggtggaagcccctgtggcagcagcacatgtgtttccagggatcgatgttcggggggcaagttctggagggtagggttctgg

SEQ ID NO: 309 - DNA, 179 bp, Homo sapiens
acaccgtctcaaaaaaaaaaaaaaaaaaagttagagctggaagaatccttgaaatcacagagaactgcattaccttggcctctggggccrtgtggctcaagtgtgtggaataaatgaaaaggaagcatcccgggtttgagggtgctctgtctgggtatgcctgctgtgggggtgactag

SEQ ID NO: 310 - DNA, 179 bp, Homo sapiens
cctggtagacaagctgcagctaaaggtcaaggcctacaagcgccaggccgaggaggcggtgagtgaccctgctggggactaggcccaggrgaggcataggagagctcgtcccccaagccaggagtctgagaacccaggccccctctcacctcatgctcccacctcccgcaggaggagca

SEQ ID NO: 311 - DNA, 179 bp, Homo sapiens
gaactagtgggactcctgaaattatgcacaaaattgtgtgtgtgcagtgctccagggagcaggtttttcagggtccggggaccccatgcvggatgaagtcccctgctctggacctcggcacatgctgggagtgactttggggctatgagtgtgatggaatttcctgggctgcaatgcag

SEQ ID NO: 312 - DNA, 179 bp, Homo sapiens
gaagtgacttcaagagtggtgtaagtggttcaaagaagcagaaggtggaggaaaagagaatctaagagaaaataaaaataagcctaagaraaagtgattcaggccctcacaggggagagccagctatgaagacaaggaggaaaatgaagagaaaagtgttgccaaggaaacagaggcaa

SEQ ID NO: 313 - DNA, 179 bp, Homo sapiens
cccagagcctaggacagagcctggcacatagtaggcattcagtgaagatttgtggagtgaatgaatgaccagtcactgaactctcttcayataaacattttacccattgcatcttagctgagcttcccatttccacatacctcccggttcccacctctgcctccctctgttttctttta

SEQ ID NO: 314 - DNA, 179 bp, Homo sapiens
  misc_feature (90)..(90): n = -/C/T
ggaggccgaggtgtgtgtgtgtgcagggcacggggtgcagggagctgagctccaggcttttggtccctgttctcatcccccgctttgtcngttttgttcactgtcccatccccagagcctaggacagagcctggcacatagtaggcattcagtgaagatttgtggagtgaatgaatgac

SEQ ID NO: 315 - DNA, 179 bp, Homo sapiens
ggggcccaagaggctggggaggggctgcactggcagtgttcccatatggtgccacccaagggctccaagaggcgtctgggcaaagaggcrtgtccctccaactccactggacctcagcagccctcaaccgagttaccgtgttccccacacagaggagatctccgacttgactgagcagt

SEQ ID NO: 316 - DNA, 179 bp, Homo sapiens
ccgcagcaggtcgcagtcatgccgggccgactgcagtgcgtgggccagggcgttcttcgcctggggaggggtgggcaccaggaggtgggytcagctttctccataaagcaaccccacccttgcccttctcctcaccccaatctcaacatcatcccttggcctcatctatgtccaaaccc

SEQ ID NO: 317 - DNA, 179 bp, Homo sapiens
aggttagtatgaaccctggagttttttaaaaatcatgttctttctcctttttcatgagtccagcaaagtgctaggaataggctccagttkaatttctttctccagttttcaggtggccctgcaaatcccaggacccatttgtgcagtccctacatcccctagccgtgcccgggcaaggc

SEQ ID NO: 318 - DNA, 179 bp, Homo sapiens
ttctggagagactctgtgtctgtgtgtgcgtgtattggcttgtgcccgaggctggagtggctcaggaggttggggagactgtggtgggawccatggagcccctgctctaggctcaccattctcggtttgcaacttggcccgctggctggtgaggtcgttgacagaacgctgggtctcct

SEQ ID NO: 319 - DNA, 179 bp, Homo sapiens
tttgggtaactcagctaacctttctgaaacttattttcctctttggtaaagtgaaattaaagataccatccttaaaaggtgttttgagartcaaataggatcgtgtatttattcatttattcaacacattctgtgcctgggaaggtatgaagattcctgtgcaaacacaaacttgatga

SEQ ID NO: 320 - DNA, 179 bp, Homo sapiens
aggaaggctccacatgagagcctcttaggaaagtccctttgtggcttttcacagagagcccacagggcaccaagaaatgccctcacattmaagaagtcaggggatcagggccatttctttgttttgcttaacttgtggttccaattcttagtgtaagttcttccaaaatgtatagactt

SEQ ID NO: 321 - DNA, 179 bp, Homo sapiens
gtgttgaccttgtcctcctcggcctgaaggtcatccagagcctgttggtgggcctcttgcagagctttcttctccttggtcagcttggcratgatctcatccagcccagccatctcctctgtcaggtttttcacctgccgaccaagaatcccatctcctttagggtcaaaggtcaccag

SEQ ID NO: 322 - DNA, 179 bp, Homo sapiens
ttcctgatccttggatgcataaaccaggcccaataaacatgcaggtgtgggaggtcatcatgcaggtgcccatcctccatgtgtccactytcaagcccctgggaaatcagctgtccctggtgccaccctgtcctgggtgctcagcacaacataggctctggaaccaagggctcggatcc

SEQ ID NO: 323 - DNA, 179 bp, Homo sapiens
ccccattgttaagcaatgtatgaccatagttgcaaatgatgtgtgtttattcttcctagctgaagtcttcaggtaataatattttaatgytttgattataagtaaacttaaatgtctctccagattgcactgctgccaactgaccatttttatatggacatgtcttttttagatgtagt

SEQ ID NO: 324 - DNA, 179 bp, Homo sapiens
catgttatagcaaaatgttagcaataaaaataaaataattaaaaagaaagatgagagtgaatgaaaatagcatggcaagtaacagtttgmtttatttttttattcaaaatctaaagattggatttaaaaaaatgtgaaaatctaaagtcgtccacaagtacccaatgctgtgcattgta

SEQ ID NO: 325 - DNA, 179 bp, Homo sapiens
tatcattgcacttgtttttcttaaccatctgataagttttacagttaaatctgagggtttaaggatggagattttttttgtgggaaaagragacacatttattgtgttgcttgtttgcttgtttttaaatgtcaacaagtttagtaaatatggcaaaaaatggaataaagaaagataat

SEQ ID NO: 326 - DNA, 179 bp, Homo sapiens
tgttagccaggctggtcttgaactcttgacctcgtgatttgcccaccttggcctcccaaagtggtgggattacaggcatgagccaccgcrcctggccagtagtggttaatccttaagaatagtattggtgagggtagaaagggtaggaactttaaattttacatgatatacttatatac

SEQ ID NO: 327 - DNA, 179 bp, Homo sapiens
cttacatctccaagcatgatagtagtttaaatagagagttgtaggcatatactactctttacaagcttctggtatattaagaaagaatayaattagataaaaaattactacttacttgaagtttcagagggataaaaagtaacaaaataaccatggaaagtaatggcaatagtaagaat

SEQ ID NO: 328 - DNA, 179 bp, Homo sapiens
agaagaaaagaatttttactttattttcctggggaaatttctattctgaataagaaatattatcatcaatgagataacaagaaattattrcaaaaacttcataacctagcacaaggccttgtccacagagacaattaataaatattttagctttgatccactaatgaaataaatgccac

SEQ ID NO: 329 - DNA, 179 bp, Homo sapiens
tttcgtttccaaatacacattttaaatttagtgacacaatagcttaagtcttcttttggactattgattttcctattattatctaaaatraaacatttttaaaagcaccattttaccattttttgcatcttcaatacattgtattagtattttggatatatatccactgcctgattctt

SEQ ID NO: 330 - DNA, 179 bp, Homo sapiens
gagatgtaatgaaggtgaatttcagaagcagtggctatctcaaggtgcagcagctgaggtgatgtctttttacctcaggttactacaaaygctttaaccttctggatgctggctgttcttttcctgggaaaagcacagctttcactgaaccaacaaatggttttaaggtgcttgcagag

SEQ ID NO: 331 - DNA, 179 bp, Homo sapiens
acttctgaacattaccagaatttcattattgtagaggatttatatagccagggataaggcagtgaatattttcacagcactgattaaaawattcttttcaggagtaggaactgaactttttttcagttatctggttgatgtttaatttgggaaaaggttttcgatggatataagaggat

SEQ ID NO: 332 - DNA, 179 bp, Homo sapiens
tgttggtcaggctggtctcgaactcctgacttcaggtgatctgcccgcctgggcctcccaaagtgctgggagtacaggcgtgagccaccrcgctaggcctggaaagtttctattcttttataccaattgtgattggtaacatcaggctattgttcatgtccccctctagcaaaagataa

SEQ ID NO: 333 - DNA, 179 bp, Homo sapiens
cttccctgtttcactgcggggcagaagtctcagagatctctcttctcttctacacagttttgttgcaggtatcaaagagtgttttctttscctttcataataatttttagaatactacacaaagaataaaagaaaaaattaaatgccacaaaagaatacacataaaaataagtttttcc

SEQ ID NO: 334 - DNA, 179 bp, Homo sapiens
gcagtcttggcccactgcaacctcccaggttcaagtgattctcctgcctcagccccctgagtagctgggattacaggcacctgccaccaygcctggctaattttttgtatttttagtagggacaggatttccccatgttggtcaggctggtcttgaactcctgacctcaggtgattcac

SEQ ID NO: 335 - DNA, 179 bp, Homo sapiens
cctggctaattttttttgtatttttagtagagacggggtttcactatgttgggcaggatggtctcgatctcctgacctcgtgatctgccygcctcagcctcccaaagtgctgggatttcaggagtgagccaccgcacccagcctgattggcctgttttaatgggaaaccattaatacag

SEQ ID NO: 336 - DNA, 179 bp, Homo sapiens
cggtggctcacacctgtaatcccagcactttgggaggccgaggtgggcggatcacgaggtcaggagatcgagaccatcctggctaacgcrgtgaaaccccgtctctactaaaaatacaaaaaattagccgggcgtagtggcgggcgcctgtagtcccagctactcgggaggctgaggca

SEQ ID NO: 337 - DNA, 179 bp, Homo sapiens
taaaagtatgggagaatttatatggtgttaacattggttatctgtagtgggtaaattagagatttttgtttgtttacctgcattttcaamactataaatattgctaaacactttgaaaataactatcacaattaagacatttcccttagttatggactttacagaatttccatacaatg

SEQ ID NO: 338 - DNA, 179 bp, Homo sapiens
aagagagctaggtgagggagcccaagcagtcctcctggcctgaagctaggaaaggggcaaggccatggcaagaaaatcagtcaacagagkagtcaggtgtggcatggtctctaaatgcttcttttattttcaaggctttaataacatcaaaaggcaatccatggtgttctcaggctaga

SEQ ID NO: 339 - DNA, 179 bp, Homo sapiens
ataaatggttatgacatgtcaggcaatttgctgcacactggaaataagatgatgagcaaaacaaagttctagctctcatggaacttacawtcttgagtgagagacagacattatttctataagaaaaatggcaagaagtacagatcatgggccttcaaagtggtttaagacatcctgtg

SEQ ID NO: 340 - DNA, 179 bp, Homo sapiens
cacaaatattaaaaaagctgagagatttagcaaccaaagcattaactaaaaacacaggaaataaaaatgagggctgcccaggggaagaayaaatattgtatatctagctatttttcctgaaaattgaccttggatttaaaactctcttcaattttactcttagtgttttgttttgtttt

SEQ ID NO: 341 - DNA, 179 bp, Homo sapiens
ggttcatctccttctccctgtgtcttcacagggtcttccctcagtgcccttctgtgtcctaatttcttcttcttataaggacatcagttrcataggattagggccaccctcatcacctcattttaaattaattacctctttaaagaccctgtctccaaatggggtcacattctgaggta

SEQ ID NO: 342 - DNA, 179 bp, Homo sapiens
tattttttggctttctagggcttccataacaagtactacaaactgggtgacataagcaacagaaatgtattttctcaggattctggaggstagaagttcaagatcaaggtgtcagctgggttggtttcttctgagggctctctccttggttcatctccttctccctgtgtcttcacagg

SEQ ID NO: 343 - DNA, 179 bp, Homo sapiens
tgttagtcaggatggtctcgatctcctgacctcatgatccacctgcctcggcctcccaaagtgctgggattacaggcgtgagccaccacsctgggcccaggcctcaccaacttggtaggacagtccctaaactgttattatgaaggggcactggtttaaggactctctggtcccatata

SEQ ID NO: 344 - DNA, 179 bp, Homo sapiens
ttgtatttttagcagagacagggtttcactgtgttagtcaggatggtctcgatctcctgacctcatgatccacctgcctcggcctcccaragtgctgggattacaggcgtgagccaccacgctgggcccaggcctcaccaacttggtaggacagtccctaaactgttattatgaagggg

SEQ ID NO: 345 - DNA, 179 bp, Homo sapiens
atgtcacccagtttgtagtacttgttatggaagccctagaaagccaaaaaatacactaaagattctttctactcactcccctttcttgtvaaaggcacagaaaatgttattttaaaaacagtgctaatcaagcacaagttcatagaaaaactttctatatgggaccagagagtccttaa

SEQ ID NO: 346 - DNA, 179 bp, Homo sapiens
ttttttttttttgagatggagtttcgctctgtcacccaggctggaatgcagtggcacgatctcagctcattgcaagctctgcctcccggkttcacacctttctcctgcctcagcttcccgagtagctgggactacaggcgcccaccaccacacttggctaattttttgtatttttagca

SEQ ID NO: 347 - DNA, 179 bp, Homo sapiens
agcttcacccaagtttatctgtcttcctgctcccaatcaatgactagttagcaagaggaaacaaagccccagcccctcagtttgaagcamacttgagagggatcaccgcctcaggggaccccactggatcagctaagacttcagttgctacagcgttgcagggcaggtgttcctgtcgc

SEQ ID NO: 348 - DNA, 179 bp, Homo sapiens
gaacacaaatggcctgagaatgcataattaaaaccatatcacaaagaacaatgggaaagatcacatttatttcagcaaataacttctttrtaaatagcttctgttttcaaagtaataaaagacactattggtgtattaatgaaggactcaagaatgaggagagtactactttcttttat

SEQ ID NO: 349 - DNA, 179 bp, Homo sapiens
atcgctttatttaatccttactacaactctatgaggcaagcaatgtcattatctttattctgcaaacgacagatctgaggcacagagaartaatttgatccaggttaaaaagctaacactgggccaggcgctgtggctcacgcctgtaatcccaaaattttgggaggccgaggtagggg

SEQ ID NO: 350 - DNA, 179 bp, Homo sapiens
taatttgatccaggttaaaaagctaacactgggccaggcgctgtggctcacgcctgtaatcccaaaattttgggaggccgaggtaggggkatcacctgaggtgatcctgaggttggggcttggatccaaggtggggggatcctgaggttgggacttggagaccagcctgaccaacatgg

SEQ ID NO: 351 - DNA, 179 bp, Homo sapiens
tacacgattttaaaagtagacaacattatagctagataggaggaaaaagttctagtgttctatactactgtagggtgactatagtttgcrttaatatattatcatgtcaaatagctagatggaggatattgaatgttccaaacacaaagaaatgataaatatttgagatggtggatatg

SEQ ID NO: 352 - DNA, 179 bp, Homo sapiens
tctcttaagtctcagatatttggcctcagtgtagtgtagataataaacctatccatattcttattggtataagaaggtggttttgtgggygcagatgggtgtgaatcctggctttaccacttattaaaaatgtgaatttgtaccaccgttttgcatacatacacatatacatatatgta

SEQ ID NO: 353 - DNA, 179 bp, Homo sapiens
aaatgtaaaaaataaacagtgaaccagatttggcccgtgggcatagtttgctgacccctgggctagataaaaaaagcaaacctatgaaawggaagatgaaatactgatataaatcactaatccccactggtgccaccagagccagaattagaactctgagacagcctgtctccccaggc

SEQ ID NO: 354 - DNA, 179 bp, Homo sapiens
atgaatagtagttatcttatgaatcttggaatgatgggaggagccattctaaaaagagggaacagcatatataaagggcctatggttagygtgatgcattgcacatttgagaaactcaaagaaagtcaatgtggtagagtacacagagcaagagagaaaaataaaatacatcgggggta

SEQ ID NO: 355 - DNA, 179 bp, Homo sapiens
attttccagcagtgatcttccttattatgaataaaggtaacaaaggtggattctacggatggagtgctttcttatagacaactgtcaacrctctgggatccaattctctttcattaccgagtatacattgctgaaattgttctcagcttcttcacaaactcccttcacatactggccaa

SEQ ID NO: 356 - DNA, 179 bp, Homo sapiens
ctgatatatgtcaggcattatatacaatgactcatttaatataactgcacacacacacacacacacacacacacacacacacacacacasagagagagactgggcatgtgtgtgtgtgtatatatacatatatgtatatgtgtatgtatgcaaaacggtggtacaaattcacattttta

SEQ ID NO: 357 - DNA, 179 bp, Homo sapiens
aagtgatctgccctcctcagcctcccaaagtgccaggattacagacgtgagccagcatgcccagctgctactgattttagtacattgackatgtatcctgaaattttactaaagtcatttattagttctaggagccttttgtcagagtctttagggtttataggtatagaatcacacag

SEQ ID NO: 358 - DNA, 179 bp, Homo sapiens
ggacattatggcaaaaccccatctctacaaaaaatttaaaaattagccaggcgtggtggcatgcacctggagtccctggagtcccagctrctcaggaagctaagatttgaggtggcttgagcctgggaggctgaggttgctgtgagctgtgatttcactactgtactccagcctgggtg

SEQ ID NO: 359 - DNA, 179 bp, Homo sapiens
gactagactgtcttctgagggtttggggggatatctgtcccttttcatttccagcttctggtgactgtcagcaacccttggcttgtggcygtgtcacacccatctctgcctccacgttcatgtagcctctcctctgtgtgaaccaaatctccctgtccctcttataaggacactttcta

SEQ ID NO: 360 - DNA, 179 bp, Homo sapiens
ttcttttcctttgggtatatgcccagtaatggaactcctgggtcaaatggtagttctattttcttttttttttaaaacagagttttgctyttattgcccaggctggagtgcagtggtacgatcttggctcactgcaacctccacctcccaggttcaagcgattctcctgcctcagcctc

SEQ ID NO: 361 - DNA, 179 bp, Homo sapiens
gattttaaattatgtttatgtggtaaatcacatttattgatttgtttatgttgatccagtctttgttgcggatttttgcattgatattcktcagagatattcatcagagatattcatcagagatatttatcagaaataaaagaaaaaaaaattcttttttattgtgtctgccaggtttt

SEQ ID NO: 362 - DNA, 179 bp, Homo sapiens
ctccatctcaaaaaaaaaaaaaaaaaaaaagttggtgaggcctataagatctatagctggttgatgcaatttgaatgtaatatagaagtytgaggtcgggcgcggtggctcacgcctgtaattccagcactttgggaggccgaggcaggtgcatcatctgaggttgggagttcgagacc

SEQ ID NO: 363 - DNA, 179 bp, Homo sapiens
atgtcatctttgtcatttctaattttgtttgggtgttctcacccatgcccactcccccttttttttttttgctcttaatctagccagtgrtctgtcaatcttgttttttttttttttatttcatggaaccaactcttggtttcatcgatcttttgtatggacttttgcatctcaatttt

SEQ ID NO: 364 - DNA, 179 bp, Homo sapiens
tccctggagtcccagctactcaggaagctaagatttgaggtggcttgagcctgggaggctgaggttgctgtgagctgtgatttcactacwgtactccagcctgggtgaaagagtcagaccctatctcaaaaagataagttcattaattaataaaaacatatttctatgtttttcttagt

SEQ ID NO: 365 - DNA, 179 bp, Homo sapiens
tcagtgtgagttatctttgctgaatgcctttgtggttattttcttgttacattaaaaaaaaaaactcaaatactgttccatattctgacrtgggtcttattaaaatgttaatcaatcggtattaaatattaaggcacagcactttttttacagatgagaaaagtgacaatgtgcttaca

SEQ ID NO: 366 - DNA, 179 bp, Homo sapiens
cagttactggggagcccagtgaataagtacagtttgtctcagtgttaccatctgccatttgcaaaacattctgtgcccaccaggaagcaycccttccctttttcaaaatcttcactcagaacatgtcaccagagagaaccccacaactccatgaagcacacattcttgcatcagtgtga

SEQ ID NO: 367 - DNA, 179 bp, Homo sapiens
gttgacatgctagctgactcaaatattatgagtgtgtgtattaaatttatatattaggatggccataagaaattctggggtttataggcyaaaatcagtcaaaaattggcaatgttatatggtttaacctaagatacattgccaaatgtttttccaaagctctcagcccaattttgttt

SEQ ID NO: 368 - DNA, 179 bp, Homo sapiens
tgtagagacggcatttcaccatgttgcccaggctggtcttgaattcctgacccatcaggtgatccacccacctcagcctcccaaagtgcrgggattacagatgtgagccactaggcctggcaccattcattcctttctatctttagtcattgtttcttccactaaaaaatgttcctctt

SEQ ID NO: 369 - DNA, 179 bp, Homo sapiens
ttctagactccagggagacactattaaacatgatgaaatgtcagctgttctggaacttgttttttggtaggagaaaatttaaaaataagmaaatatataaataatcgtcagttaatgtataagtgtcagttagtgataagtgctatgtttttctttaagtaaaataaatcagggagttg

SEQ ID NO: 370 - DNA, 179 bp, Homo sapiens
tatatgctgttccctctttttagaatggctcctcccatcattccaagattcataagataactactattcatctctcaaatggtatgtcarttgctgcttctttagaaaagaaactcaatcctccctcacaggatgtcttaaaccactttgaaggcccatgatctgtacttcttgccatt

SEQ ID NO: 371 - DNA, 179 bp, Homo sapiens
cattagctgttttttgttttgttttttgagacagggtctcactctgtcacccaggctggagcacagtggtgcaatcacggctcactgccrcctcaacctcttgggctcaagtgatcctcctgcctcagcctcccgagtagtagctggaaccacaagttcacaccaccatgctcagctaa

SEQ ID NO: 372 - DNA, 179 bp, Homo sapiens
caggctggtcttgaactcctgacctcgtgatctgcccacctctgcctcccaaagtgctaggattacaggggagagccactgcacccgacstgcaaatccttttatttaaacattagcttcaacatattttagacaatttcaattatgtgacttttgaatgagtaacactgagcctgcag

SEQ ID NO: 373 - DNA, 179 bp, Homo sapiens
gggatcctgaggttgggacttggagaccagcctgaccaacatggagaaaccccgtttcaatagaatattaaaacacaaaattagctgggsgtgttggtgggcgcctataatcccagctactcaggaggctgaggcaggagaatcccttgaacccaggaggcggaggttgtggtgagcag

SEQ ID NO: 374 - DNA, 179 bp, Homo sapiens
agaatagttgaatttcacatctgaaagaaccttcagagtaatcttactaaatccccttattttatataggagaaaacaaagtctctgtaragtgaaatgttttggccaaggtcaaacagctagttgctgacagaaccaagtttggaaacctaattaattttggctgatctctcctgttt

SEQ ID NO: 375 - DNA, 179 bp, Homo sapiens
aactcttgacctcgtgatttgcccaccttggcctcccaaagtggtgggattacaggcatgagccaccgcgcctggccagtagtggttaawccttaagaatagtattggtgagggtagaaagggtaggaactttaaattttacatgatatacttatatacttatgtatattgctttccat

SEQ ID NO: 376 - DNA, 179 bp, Homo sapiens
gtaatgtatcattgcacttgtttttcttaaccatctgataagttttacagttaaatctgagggtttaaggatggagattttttttgtggraaaagaagacacatttattgtgttgcttgtttgcttgtttttaaatgtcaacaagtttagtaaatatggcaaaaaatggaataaagaaa

SEQ ID NO: 377 - DNA, 179 bp, Homo sapiens
aggcatatgttatcatagagaagatctagagatttttaccttatctagagatttttggcccaaatggcatattaactttgaggtttgtcygtgtctgcttccatgcaatagaagtggaacatttgtttgactttttaagtgaatgatttagcctaagaatcaaactttacattttaatt

SEQ ID NO: 378 - DNA, 179 bp, Homo sapiens
tcattgtgtcaaaaaccatggttttccaaaatttctttctcaacatttctgttttgaatctcagttgcttatttgtcagcattagaaaartgctatcatacccattaatttctcaacattttggaaaatgtgttccagaaaatctaattgtcattttaaatattaattacattttataa

SEQ ID NO: 379 - DNA, 179 bp, Homo sapiens
cacacacactcacacacacatatatacaatttagagaaaattccaagttatcattataatattattcctaagtagctgagaaaaaagttygctagaatttgaatttttgttaacagtgtttgaatatcaagtctatctttaaaaaatatggggctttctaaaataattttctctacatt

SEQ ID NO: 380 - DNA, 179 bp, Homo sapiens
tgcccaggctggagtgcaatggcgtgatctcggctcactacaacctctgcctcccagggtcaagtgattctcctgcctcagcgtcctgartagctgggattacaggcgcccgccactacgtctggctaatttttgtatttttagtagagacggggtttcaccatgttggtcaggctggt

SEQ ID NO: 381 - DNA, 179 bp, Homo sapiens
attagaaaagtgctatcatacccattaatttctcaacattttggaaaatgtgttccagaaaatctaattgtcattttaaatattaattayattttataattatttggtcataagcatactgcttcctgccaaagaacagggcaagagtagatgccttaaaagtagacgagaaatattaa

SEQ ID NO: 382 - DNA, 179 bp, Homo sapiens
catgttagtcccagctgtttgggagggtgaggcaggaggatcacttgagcccagaaggctgagtcagcagtgagccatgattgcaccacwgtactctagcctacgtgacagggcgagatcctgtctcaaaaacaaaacaaaacaaaaacagaaaagaaagagccaatgaaacaaaaccc

SEQ ID NO: 383 - DNA, 179 bp, Homo sapiens
cattggctctttcaaatgcttgatttgaagtccctttgtctttctctcagtttcacctccgaggtcccagacctcttttattcccctaartatcttcttaaaggcagtgatgtgctctagctcccacttaagtaccatgattttttttttagctgaattatatgataatttgacaacac

SEQ ID NO: 384 - DNA, 179 bp, Homo sapiens
tgaagcttcaaattaaagtaacttgccctaggtcaccagccagtgaaatagcaaatgcagggtccctttcacataaccattttgctgttstttcagaaaaatctaaacaaaccaagacattcacaggaggttttccttccttcggcaccagagaggtggttatttgtttcccactaggc

SEQ ID NO: 385 - DNA, 179 bp, Homo sapiens
ctgggatattctttttgttgttgttgttggggttttttttttttttagacggagtgttcctctgtcgtccaggctgcagtgctggagtgyggtgatctcggctcactgcaacctcccactcctgggttcaggcgattctcctgccttagcctcctgagtagctgggattataggtgccc

SEQ ID NO: 386 - DNA, 179 bp, Homo sapiens
attttcttccaaattccagaaagatcattttaaattgtgctaactggctgtgtaaagccttcaacagcttcccattacactctccatatygtgaaaactccacgttcaatcttttttttttttttttttttttttttttttgagatggagtctcgctctgtcgcccaggctggagtgca

SEQ ID NO: 387 - DNA, 179 bp, Homo sapiens
ctacccagaacccttctatgcatttccatcttcaggtggtcaatatgcatttaactgaacgaaaagcttaggacttgccataagtcaggrcattatccttgcatcctctctgtttctcacacttgacatccaatcatcaaccagtggtgctgattctgcttccaaaatatatctctgct

SEQ ID NO: 388 - DNA, 179 bp, Homo sapiens
ggaaggaaggaaggcacaggaaggtagtgtaatgtagaaatgggtagcttctggggttactaatcagaaaccctgagtgctacagtaatyctgtgattcaattcgaatccaaagtttggttaagttaatcaaacatttagtaagaatcagcaatgagcaagatattatgtgccaaattc

SEQ ID NO: 389 - DNA, 179 bp, Homo sapiens
ttaaaaatatgaacatacgatcatgctattagttctctgagtttataaaaaaaataataatctcttaaccacacttctcccatcatccascacctcacgtgttttgcttctttttgcaacaaaactataccacactcattccaagttctagctttgttcaaatcaacttttgtccactc

SEQ ID NO: 390 - DNA, 179 bp, Homo sapiens
ggtgccaccagagccagaattagaactctgagacagcctgtctccccaggccatggcattatccattgcctcaaaatcatgattcaggawctatttgccaatatttttatttagaagttccatctctgaataatatctatgctttaaatcacattgaactttaaaagtgttagtgacca

SEQ ID NO: 391 - DNA, 179 bp, Homo sapiens
atccccactggtgccaccagagccagaattagaactctgagacagcctgtctccccaggccatggcattatccattgcctcaaaatcatrattcaggaactatttgccaatatttttatttagaagttccatctctgaataatatctatgctttaaatcacattgaactttaaaagtgt

SEQ ID NO: 392 - DNA, 179 bp, Homo sapiens
agcctgaccaacatggagaaaccccgtttcaatagaatattaaaacacaaaattagctgggcgtgttggtgggcgcctataatcccagcyactcaggaggctgaggcaggagaatcccttgaacccaggaggcggaggttgtggtgagcagagatctcaccattgcactccagcctggg

SEQ ID NO: 393 - DNA, 179 bp, Homo sapiens
cctttcctacttttctgccttcctttctgatgatgagaccaagagacggatggaagaaggtagagatcttcctacacagatgatactgcwggggcatagccccttcacactgactggtcgttacagactttcctctctaaaggctgaatctttcacagatgcatttgtggatttttcag

SEQ ID NO: 394 - DNA, 179 bp, Homo sapiens
taaggtcaggagttcgagactagcctggccaacatggtgaaaccccatctctactgaaaatacaaaaattggccgggtgtgctggcagaygcctgtaatcccagctactcaggaggctgaggcagtggaattcttgaacccggaaggcagaggttgcagcgagccaagatcatgccatt

SEQ ID NO: 395 - DNA, 179 bp, Homo sapiens
ttttgagttcagcacacttagtttttaacactggcttcattatgttaacagttcccattcactcaacaatacacatttttagccgttaaytatatgccaggcaaaatgcttggcattggtagtaaattagggagcaaaacacatattatttttcccttacagtttaacgagggagatgg

SEQ ID NO: 396 - DNA, 179 bp, Homo sapiens
atctgacacatggtagtctgtcaacatattactttcgagttagattgggcacctgacttgtacttatttattagttcgttgcttctttgrttaatttagagcagctgtggaagaattaaccaactcacacaaacaagcagtgcatactttttaatgactaatttatctcttaggtattt

SEQ ID NO: 397 - DNA, 179 bp, Homo sapiens
cacaaatgattcccctgctgttgtagggttctttattagtagcatactagcaaaggctttatggcttgaaatactttgctcaggtgtgcygcagcattaaaatgtaaattttctgaacttcggatttttcctttggcctttcgttgatgccccattagtgctcattaacttttcctgct

SEQ ID NO: 398 - DNA, 179 bp, Homo sapiens
ctctttctctttctctctctctctttctttttttctttcttctttctttctttctctttctttctttctttctttctttctttctttctytctttctttctttctttcctctctctctctctttttttttttctggagaagagtggtttaaaagggagttgaatataacagagcacctc

SEQ ID NO: 399 - DNA, 179 bp, Homo sapiens
tcatcacaagataggaaaacacagctgccatcgttttaggaaagaaatagtcatgagtaatgctttaacacacatttcaaagcatcaggmgttctaaaaatctcaagagagttgtgacttttattgtccctatatgttctaagcatcatgcaactttcattgttaaaatgcttacatta

SEQ ID NO: 400 - DNA, 179 bp, Homo sapiens
gaaaggaaggggtccagtttcagtcttctacatatggttagtcagttgctgaatagtatgttcttgtttttgtgaccttgttgaagatcwtgttattgtaagtgtgcagctttatttctgagtgttctatgctgttccattggtctgtgtgtctgtttttgtaccagaaccatgctttt

SEQ ID NO: 401 - DNA, 179 bp, Homo sapiens
caggagaatcgcctgaacccaggagtgggaggttgcagtgagccgagatcaccgcactccagcactgcagcctggacgacagaggaacamtccgtctaaaaaaaaaaaaaaccccaacaacaacaacaaaaagaatatcccagatcggaggtaggtactttcaatagaagttctcctct

SEQ ID NO: 402 - DNA, 179 bp, Homo sapiens
gactaagaaaataggcatgccagcaattgaacacatttactgttaaaggcaatttgatgtaagttaaagtcaagtcggggtaggtttttwtttgttttgttttgttctcatataattctatagatttcctaggagtcgtgaaggaggaagtagtgaacacagtaatatagatacctgct

SEQ ID NO: 403 - DNA, 179 bp, Homo sapiens
ttgcccactctgtgccatggtggccaaatcctgccaaacagtggcagatggtgtcttccccacagaccttctacaagtcacatggcaatkggcctgggtgaatgttccagctccttcgtgactggtctatcccagtcaacctgccttaccactccctcccccactctggcaaatagaac

SEQ ID NO: 404 - DNA, 179 bp, Homo sapiens
cttaaaatatgttctccctggagggaaacaaataacacattgcatctgactaacctttctgcacttcagctgcattaattcacatttagycatggattccatcatgagccagatgaacttagtgccacagctgttttcatcgaggggaaaatatgcttttccattttagattcccagca

SEQ ID NO: 405 - DNA, 179 bp, Homo sapiens
tttaccaggcttatggaagaatctcagtcatatgaaactgcccccactctgctatgttgaactatttcctgttgcataggaccttttctyccctgttcccgcaaagacctctttgtcactctagtggcaaaagtgaagagaaactccttacatgtttcctttcctacttttctgccttc

SEQ ID NO: 406 - DNA, 179 bp, Homo sapiens
ttcattatcctatgaaatgaattatctctctgaataatgccatgagttatagatttttcgctccaaatttttcctatttctctacttgtyattcaaagggatatcagccaaattggcaaatttgaagtcttctctttcagacatgccaaattttagactgaagtgaactattatggcca

SEQ ID NO: 407 - DNA, 179 bp, Homo sapiens
aagacctgcctggacaaactctatttgtaataacagcagctgacatttgtttagtactttgctattttcatagcttgattagattgaaakcccttttcaattattggataaaagaagcaggtgaacacaaatggcctgagaatgcataattaaaaccatatcacaaagaacaatgggaa

SEQ ID NO: 408 - DNA, 179 bp, Homo sapiens
agggccctctgacatgacgaggtaagggagaagaagactaacaagtaatggtgactaagagacagggacaatagagtaggatgaaaactragaaagttagtgtcctaaaagccaaatgaagaatgtgtacccagaaaaaaggagtaatcaactgggtcaaatgattctgattgggcaat

SEQ ID NO: 409 - DNA, 179 bp, Homo sapiens
tttattgaattttattaagctacttttcaaacatacaaaaagttaaaaagaatattttaacatcattttctcagtaatttatagaacatrtacagaaaaaaaatcagaaaaatatggaagactaaaacaacatcatcaacaatttgacctaattgacatgtatagaatatcagggtcat

SEQ ID NO: 410 - DNA, 179 bp, Homo sapiens
tgaggttagacaccagaatttagatacccctacacttgtagacaagagatggcaggtaaggaggtgctcatctccagcacatgagtgtcrcaacacatcaaacgacaatcacacactgatttcacaaccccaaattcttcagtgactgaagagcatgttttcttccttaattttattgg

SEQ ID NO: 411 - DNA, 179 bp, Homo sapiens
tatgttatacgttttccgtgagatgtaatgaaggtgaatttcagaagcagtggctatctcaaggtgcagcagctgaggtgatgtcttttyacctcaggttactacaaacgctttaaccttctggatgctggctgttcttttcctgggaaaagcacagctttcactgaaccaacaaatgg

SEQ ID NO: 412 - DNA, 179 bp, Homo sapiens
gtatgcatgtgccatgttggtgtgctgcacccattaactcgtcatttacattaggtatttctcctaatgctatccctcccctctcccgcmaccccacgacagaccccggtgtgtgatgttccccaccctgtgtccaagtgttctcattgttcaattcccagctatgagtgagaatttgc

SEQ ID NO: 413 - DNA, 179 bp, Homo sapiens
aaaataattagaagatagggaagaacacaaggattaagacagataattgtcataaccaaacattcattccttaaatatttaagttgtatrtatgaaggatcatgaccaatgttaatatgtgaaggagatttatgtggggaaatgtgtttctgtgtattatacagactgtaggaaagtac

SEQ ID NO: 414 - DNA, 179 bp, Homo sapiens
agttgcagtgagccaagatcatgccactgcacacctgcctgggggaaagagtgagattctgtctaaaaaaaaaaaaataaataaataaaraagaagaagaaaatggagccaacaggagttgctaatgcagctgacgtggtgcaaaagaggaaagtcaaacgtaacttcaagatttttgg

SEQ ID NO: 415 - DNA, 179 bp, Homo sapiens
cagggaagccattagatccaccctggtgccactggaataactgaggtcccatagggagggaacacctaccaacaacaagaggcaagggakagggtagatgaggacgaggcctggattggaagttcagaatgaaactaccaaccagtaagaatgtagaggagcccaaagccttcagaggc

SEQ ID NO: 416 - DNA, 179 bp, Homo sapiens
cccagcactttaggaggcgaaggcgggtggatcacgaggtcaggagatcgagaccatcctggctaacatggtgaaaccccgtctctactraaaaaaaaaaaatacaaaaaattagccgggcgtggtggcaggcgcctgtagtcccagctactcaggaggctgaggcaggaagaatgaac

SEQ ID NO: 417 - DNA, 179 bp, Homo sapiens
ttagtagagacggggtttcaccatgttggtcaggctggtctcaaactcctgacctcgtgatccgcccgcctcggcctcccaaagtgctgrgattataggcgtgagccactgcacccagccaaaaagatgtatttttgagatatattaaatgaacgccttattttgtttatagtggattt

SEQ ID NO: 418 - DNA, 179 bp, Homo sapiens
catagtggcaggcgcctgtagtcccagctactcaggaggctgaggcaggagaatggcgtgaacccaggaggtggagtttgcagttagccragatcgtgccacttcactccaggctgggcgacagagcgagactctgtctcaaaaaaaaaaaaaaagaaaagaaaaagaagtctccacaa

SEQ ID NO: 419 - DNA, 179 bp, Homo sapiens
ctaaaaatgcttatgagaatgtgttgaagtcttggcatcaaaccccttatttatgagttaaaatttattgaccaccatgagaaaattatyttataagatagttttggaatggaggccatcaaaaaataagaaaaaatatggtagtgataggagaagttgggcagtatctaaatgtaact

SEQ ID NO: 420 - DNA, 179 bp, Homo sapiens
tgaccatttgcatatatctcctttggataaatgtgttttcaaatctttggcctagttttcatttgggcttttattattattattattatyattattattattattatcattattattattattattgtcaggttgtaagagttctttatatagtctaggtacaaacctcatgtcagata

SEQ ID NO: 421 - DNA, 179 bp, Homo sapiens
gaggtcagaagtgagacccccaccgagaagcatgtgaaaggagaatttacttgtgggaaagaatagagaagagaaaaatgaatataaaaraaactaaggatcctaccaagattatgactaaaacaactgggtcattgttgataaaaatgaggctatgaaagaagtagattttatccttt

SEQ ID NO: 422 - DNA, 179 bp, Homo sapiens
gccattcactagcagcaacacttgggaacttgttagaaattcaaattcttggatctctaccctggagccataatcagaatctgcatgttwaagcagatttccaggtgattcctatgcatgttaaagactaatacgaccccacatctattggcagaatatgcacatgttccttggagact

SEQ ID NO: 423 - DNA, 179 bp, Homo sapiens
gcctaatttatgatgaaggatgaggatctttttattgcttaatggtcaaatagtgatgatgaaaaatatagtattcatattagaaatagycatatccttatgaaaaaaacggtgattaaaagacattcaaaaaagcgatgattgaatacttgataaaaagaggaatggatatgaaggaa

SEQ ID NO: 424 - DNA, 179 bp, Homo sapiens
tataaagaaaaagaggtttaatggactcacagttccattggctagggaggcctcacaatcatgacggaaggttaaaggcacatcttacayggcagcaggcaagatagaatgagaaccaagtgaaaggggttcccccttataaaaccatcagatctcgtgagacttgttcactaccatga

SEQ ID NO: 425 - DNA, 179 bp, Homo sapiens
aaaggcagtgaatcctagttgaaatgaattcgtgtgtttgtttcacataaataagctaacagtgaactcctacatatcttaagaagagtwgtaggtacagcagtttgaaggcttataaccttcatcttttattttgacatgaaaacttcaaacacatttttaccaaggagacctttata

SEQ ID NO: 426 - DNA, 179 bp, Homo sapiens
cacaacaatgctataaaccacagatgggaaattgtgcagatgaggaagttgagacacaggttaaatcgtgacatcaactagtggcagggkcagaattcaaatctgattccacagcctgtgagcatgactactgtggatactgcctctcaagagagacatgtaatcattctgaatatatc

SEQ ID NO: 427 - DNA, 179 bp, Homo sapiens
aatacatgacttttaagttttgaagcagataataaatatctttttattttgattactgttttgtgaaaattgctctgtatgtttatacayacatgtataaacacgtaaaagtatgggagaatttatatggtgttaacattggttatctgtagtgggtaaattagagatttttgtttgtt

SEQ ID NO: 428 - DNA, 179 bp, Homo sapiens
aacaatcatgtactattaaaatattttactgcccacacccccaatacatcaattatacaccattaaaatattatcaatgtgctgaaattktgttataataaaataataaagtagccattgtgaaaagattatatggcagcaatatgtgtggggtcattaagatgaatctatattatgcc

SEQ ID NO: 429 - DNA, 179 bp, Homo sapiens
aaatacatattgaatgtatttatttcttcctgcttcatcatcaacttttattagtgtctaacattcagattggtaacttgaataatgggragaaaagatatttacacaatatttttaccatcagaataaggaaaaggtagatgtttattcaggaaatatacaatcctatctagaattca

SEQ ID NO: 430 - DNA, 179 bp, Homo sapiens
tgctgagtgcccaggagagaaatgaaatggttatatagatatagtatctgctctgcttcacttaagatttaataattaattattaatatyataacaggttacaagataaaatatcatatgattatctccacagataaaaatagtaataataaaatgtaacacccattcctgatattaaa

SEQ ID NO: 431 - DNA, 179 bp, Homo sapiens
agataagaacgttatttaacttttattttcaccgtgtctagcaaaatatttccaataatatgctccattgattctttggtggttataatratcataaaatacaagttgattttaaattcagactttagatcctcagaaacttctggataaacacataggtaataacaagcagggatccc

SEQ ID NO: 432 - DNA, 179 bp, Homo sapiens
atctaagtagaatggaatcacttaggaaagtagaaaagatgagagtttcctttagattttgttgctttttatgattgatatacctattcytcacatttaaaccatagttcagttaatgtgagaccaaatcaaatgtaagacataccatcattttaggtattactaagaataataacaca

SEQ ID NO: 433 - DNA, 179 bp, Homo sapiens
acttcattaacacatcaaaatacccccaagataatgaaattagaaggtgggaacttgggggagttgatgacatcatgagggtagtgcccycaagaatgagatttgtgcccttataaaagaggccccagagagatccttgcctcttctgccatgtgaggttacagcaaaaacactgacat

SEQ ID NO: 434 - DNA, 179 bp, Homo sapiens
ttcctatcagcctatgaatgtgtgtctctctttttcctttctctctagttataagatatatgtatataatatatacacccacacatgtartaaagcttctctctttatgactctagcatatgtaaatatatagacaaaggaagagtagtaacttgaaaggggaagtacattctgttatg

SEQ ID NO: 435 - DNA, 179 bp, Homo sapiens
ataatatatacacccacacatgtaataaagcttctctctttatgactctagcatatgtaaatatatagacaaaggaagagtagtaacttraaaggggaagtacattctgttatgttttggtgaaaacgcagaacaaaatacagaagccaaacaagttttcaaaaaatctctacttttct

SEQ ID NO: 436 - DNA, 179 bp, Homo sapiens
ttttgtgggattctttgaatgttaaatgcctcaacatttgggaggcactataaattgtatttgaacatggaacttctctatataacatcyttcctggcttcataggctcacatttgtaaagtttcaacacttaacattgtagtggtctgttaatctcttcctgctgccttagcaaaata

SEQ ID NO: 437 - DNA, 179 bp, Homo sapiens
acataacatgagatctaccctcttaaattttaaatatataatacattgttgtacagcagatctctagagctttctcatcttgcatgactragacttatactcactgaatagcacttgccattcctttcccaacctccaacccccagctcctggcaaccatctctctaccttggcttctc

SEQ ID NO: 438 - DNA, 179 bp, Homo sapiens
ttgaaggacttttctgcatctattgaaataatcatgtgttttttgtctttagttctgtttgatgtgatgaacttcatttattgatttgcrtatgttaaaccagccttgcatcctggggatgaagcaaacttgattatggtggataagcttttttatgtgctgctggattcagtttgcca

SEQ ID NO: 439 - DNA, 179 bp, Homo sapiens
tttcacacaagatattaatggtaataattaaatgcaagtgcaactgttagctcaattacgacaacaacaattaaagtggaggtaaaatgwtatgcataacactccaaggtgtattttaggcaaaatcttcagattttttgtttgggattttagtagaagaattcaaatacccagacttc

SEQ ID NO: 440 - DNA, 179 bp, Homo sapiens
gtgtagttttcagatatcttcttgattttgatttctgtatttattgtaccatggcctgagagtatgcttggtatgactttgatttttttwaaaatgtattgagactttctttatgaccaaacatttgatcagtcttagaatatgttccatatgcagatgagaagaatgtatatcctatg

SEQ ID NO: 441 - DNA, 179 bp, Homo sapiens
tcaaaaattcactcatcagccaaacgtaagctctagtggagtaggacctttatctgtcctattcaccacggtataccaagcatctagagmagcacaatcactttttgaatgaatggataaaacctttagtattgttattaacaagtattaatagtactagtagcattaatttttataat

SEQ ID NO: 442 - DNA, 179 bp, Homo sapiens
ataatgagagccagatttacttgcattttaatttgactaagttgagtttaagacatctttgagataagtggaaatgtcaaataagctttygaatgtatctgaagctcagagtgtcctagattagaaatattactccgatattcattggcttacagttggttattgaaatcataggcctg

SEQ ID NO: 443 - DNA, 179 bp, Homo sapiens
aaatttagaatagattttttctaattctgtgaaaaataacattggtggtttgataggaaatgcactgaatctgtagatcactttggtcartatggccattttaatgataatcattcttccaatccatcagcatggtttattctttcatttattcatgtcataagtgatttcatttagca

SEQ ID NO: 444 - DNA, 179 bp, Homo sapiens
cagtctatcctctatacatttggcaatttgaagatgattatatatctctatctatctatctatctatctatctatctatctatctatctmtctatctatctctctatctctctatctgctttcctatctagatatagacacataaatatagatagatataattataccccccaactttt

SEQ ID NO: 445 - DNA, 179 bp, Homo sapiens
aatcattgtatggctgcggagttttgtttgtttgtttttgtttatttttagagacaggatcttcaggatcttgctattttacacaggctsccctcaaactcctgggcacaagggatccttttacttctgccttccaagtagctgagactacaggcgcatgccactgcacccagctgtag

SEQ ID NO: 446 - DNA, 179 bp, Homo sapiens
cctcttcccctcgtagctgctttgcatcctcatggagtccttcactagccaaggcttccctcaccaaggtaccccacttggatgagaccscttaggtatcatctcattctttaattcaatctgtgtgcaacttaatccacataatttttacaattaaagaaatttagacaccatctatt

SEQ ID NO: 447 - DNA, 179 bp, Homo sapiens
actgtagccttgtagtatagtttgaaatcaggtagcgtgatgactccagccttgttctttttgcttaggattgtcttggctatacggggkcttctttgattccatatgaaatttaaaatagtttttttctaattctgtgaagaatgtcaaaggtagtttgatgggaatagcattgaatc

SEQ ID NO: 448 - DNA, 179 bp, Homo sapiens
acagcagcattcgcggttcacaaaaatccactgttccgaagccatccctgctgctacccaggcaaacagggtctggagtggacctctagmaaactccaacagacctgcagctgagggtcctgtctgttagaaggaaaactaacaaacagaaaggacatccacaccaaaaacccatctgt

SEQ ID NO: 449 - DNA, 179 bp, Homo sapiens
ccactgttgctgcctcctttggcttgtcactttctccaggggttatcagcttcagtgcccagcaaggtcagtggcttgccaagcttcagmggccatcatgagtccctgacttagagaaggagtgagtcactgttctaacacacatcaaaatttaccagcaatactcttgttctgatagt

SEQ ID NO: 450 - DNA, 179 bp, Homo sapiens
tcattaagaatgagaattttggcacttgataagagtaggcatttttgttttttagcacctatttataatacaatatataatacaaatagrcactagatagagatgcccacttacagttcttttgaaagcatgttctaaggctacaacaatcccatcatgaaaaagtggggagaaacaga

SEQ ID NO: 451 - DNA, 179 bp, Homo sapiens
acgttatttattcaacccagaaggagtcacaaatgcagacatgtatggtaaacttttattgctgttgttacattattatcccaaaaactyaaaaattggccaaacttttttctttcccagagacacccatgaatctatctcataactatttatttctcagctggcctattatgtaacac

SEQ ID NO: 452 - DNA, 179 bp, Homo sapiens
tttttaatttagtaaaacttcaacctacttagatggttactgcagctgtgttacataataggccagctgagaaataaatagttatgagayagattcatgggtgtctctgggaaagaaaaaagtttggccaatttttgagtttttgggataataatgtaacaacagcaataaaagtttac

SEQ ID NO: 453 - DNA, 179 bp, Homo sapiens
acccaccaaagatttttcaggactgctctattctcagacaatcttgtcggattgtcaaactaggcatgcctctttattgtttgaaaactrcaacccccacagatacagttttttgttattgttgttgttgtttgttttgttttttgagatggagtttcactcttgttgcccaggctgga

SEQ ID NO: 454 - DNA, 179 bp, Homo sapiens
aacaaacaaacaaacaaacaagcaaaagctgaaaattgaatatctgctctttacatttagattctgaaatagaataatttgtaatttttwaaaatatattttaaaatcattaaggacagaacctaaatcatcaggacagaacattttataaaaatggtgctgtgaataagtaaagaaga

SEQ ID NO: 455 - DNA, 179 bp, Homo sapiens
tgggacctcggaggtgaaactgagagaaagacaaagggacttcaaatcaagcatttgaaagagccaatgaggggccagatgtggtgactyactcctgtaatcccagcactttaagacgccaaggcgggatcccatctcaaaaaaaaaaaaaaaaaaaaaaaaaaaaaaaaaaaaaaaaa

SEQ ID NO: 456 - DNA, 179 bp, Homo sapiens
acacatgctggatcccctccttacagagtacatgcctttgggttttgttttgtttgtttgtttggctatttcttatcattcaaatctctmtttaaatgctttcttctcagaggagaacttctattgaaagtacctacctccgatctgggatattctttttgttgttgttgttggggttt

SEQ ID NO: 457 - DNA, 179 bp, Homo sapiens
attcacttgtcaatttatagaatatattgttcttgttatgtatcttgtttttcatttaattgattttagatatctttttatatcagcaamtataaatttacttattctttttaatagctgcatagtattccattgcatgggtgcagaatatttagatttttttaatccagctcttaata

SEQ ID NO: 458 - DNA, 179 bp, Homo sapiens
atttccatcttcaggtggtcaatatgcatttaactgaacgaaaagcttaggacttgccataagtcagggcattatccttgcatcctctcygtttctcacacttgacatccaatcatcaaccagtggtgctgattctgcttccaaaatatatctctgctcggttttcttctctctgtctc

SEQ ID NO: 459 - DNA, 179 bp, Homo sapiens
ttcatttgggcttttattattattattattattattattattattattatcattattattattattattgtcaggttgtaagagttcttyatatagtctaggtacaaacctcatgtcagatataaaacctataatattttctcctatcccatgagttgttcttttactttactggtggt

SEQ ID NO: 460 - DNA, 179 bp, Homo sapiens
ttatcctcaagaaactattgtttatcatccaataaacatcaagtagaggtggaattctgctgaacactcaaggaacaccgatcaagtccrttattgaagcaatcgagtacttacaaaactagtaagtaggtagaggagaagagatttttgtttctgctgtatctcttaggcaatttctc

SEQ ID NO: 461 - DNA, 179 bp, Homo sapiens
ctctttgtcctggagcactgcaatattctactagcttgtcttcagactctagtcttccctcactctcttctcttccatacactgtagccrgagtgatatttttaatagacttaatttttagagcagttttaggtttataaaacattacattaaaaagtacatagagctcccatatacag

SEQ ID NO: 462 - DNA, 179 bp, Homo sapiens
ctaataccaagtatacaaaattacttatatctgttactacagagaaactgccccttttccttcctaaatccagttcttcatctgtctttsaattccttccactcccaccttttcaggaaccgtaatctattgattgtactgtttttatcttgttatgtaattttggctcctgtgtgtat

SEQ ID NO: 463 - DNA, 179 bp, Homo sapiens
gaaaagacatacataatacactttttaacttaacaaaagacctatattatgctgttctaaaataattttatttacctttttaaccaaatyaaaggcacccaatgccacaaagatattttcagctaatgctagtgtcttcaagtcagagagcatttgtaaaattgtgtatttttaacagt

SEQ ID NO: 464 - DNA, 179 bp, Homo sapiens
ctgctctaaacactttgccactttaaccttttttttctttttggttcattgtaaatccttcatttatttacatcttattcttttcaataktccttcacttgctttaggcaaatgtgttttgagtttcttcagattaagaaagaattatgctatcagttgccggtgttccttagcctgtc

SEQ ID NO: 465 - DNA, 179 bp, Homo sapiens
aatatgaaaactatattattatcctttttatcgttacgctacttctttgaatgtatctcacaggacagcatgaactgtataactcagctyacaattaacagaaaaaaaattgcactttaattcccaaatttgattatcagatgttcaatgaagacaaatacaaaataacattgtagaat

SEQ ID NO: 466 - DNA, 179 bp, Homo sapiens
aatgaagacaaatacaaaataacattgtagaatcttgcttttatccctaatactgctggaaaaatattaatctcaattttagtttttccmtatgtatcatctggggaccccttgcattcaaatcacaaacagtgaaatcatacaataataactttaggagaaagaatttaataatgact

SEQ ID NO: 467 - DNA, 179 bp, Homo sapiens
cataaagaagggagaaattactttttgccagaagaaccaggaaagacttaatggagaaaatggcacctgaaccagccctcaaaatatagwtaggatttttaccagcaaagttgtgaaaatatgctagcaaaaaggaagagaataattagtcaataccaccttgattagagaaggaggac

SEQ ID NO: 468 - DNA, 179 bp, Homo sapiens
gtgatactctgataaaatggcaccatctggaaagaaagatgtaaaattttctcctcagctgtgttgattggggattatattaaaatgtgycttgatcacaaatgattcccctgctgttgtagggttctttattagtagcatactagcaaaggctttatggcttgaaatactttgctcag

SEQ ID NO: 469 - DNA, 179 bp, Homo sapiens
acttatatggcacatgtacaattcaagatcttaagtagaacctgaagatatagaactaaacaggagttatacatacacacacaaatacayatgtggataaaatgaatattagatgctatgttctaaaactgagataaatcacaaaatgaattacttcacaaagtcatttcagtaagtag

SEQ ID NO: 470 - DNA, 179 bp, Homo sapiens
gggggaacaaacagagaatatctatcgtatttactaagagagaattttaaaatatcacatggttttggctcaagtgcatggggatgggcmttatggagcttaaatcttcctaattcccatttctaacaggggaaatactcttctagatatagagaaaaattgaagtcatcttttactct

SEQ ID NO: 471 - DNA, 179 bp, Homo sapiens
tcttaactccctcttaaagtaaataaatcatctttgccggcagggctatgctgaacttccttaggcactctctagttagatgtcctaggycctcccaattcttactcctttaatacctgtttttctccttgtcttattccattattttttcaattcccacaaaattgtatccaggccat

SEQ ID NO: 472 - DNA, 179 bp, Homo sapiens
tacctcccacctccactgccgcttacattcatgatacctcatttctatgacacaatttctaagtaggtttcaccctaaagttttattttktatgccattacttaaatgtttatcattttatcccactgataatggaacacaaatagaaactttttataatgaagatacaatcccaactc

SEQ ID NO: 473 - DNA, 179 bp, Homo sapiens
tattggaaagggcatgaacttagatcagaagaactgaatttagtcctggatgaaactgttgttatcatgcgacactgagcaagtcccttmattttttggttcctctgtttacaagtttataaaattgggatgattatttctgtcctgtctacctccccgggttgttacaaaatcagatt

SEQ ID NO: 474 - DNA, 179 bp, Homo sapiens
tgttccagaaactggcttactgaaaaaaaccaagagtccccatataaattagagaagactcatagatgtgccccttgcttaccttgcaaygaggccagatacagacattctaaattcccattctttgcctcataaatgattagctgaactgcttgccccgccggtcggccagaacaaaa

SEQ ID NO: 475 - DNA, 179 bp, Homo sapiens
tgtgagccattgtgcccagcccaatagttcttgtagctctgattgcttagcctaatgttagctactgccaaaatcaggtctttcctgtayatttctgcctcctaatgaaaagagttgattcagagacccagcaaggcagtaagaatactatttgtgaataatccttacaatgagtaatt

SEQ ID NO: 476 - DNA, 179 bp, Homo sapiens
tgctacaggaaaatctatctatgaatgctaaaattggtgggcataatttgaagtggaaccagtaaatttgcatagactccaagtatctcytttcaaatatttaataactataaagagaaagatgcagcttttaatgcagaatcctggcagcatcacttagccaagtgatcaaagttaat

SEQ ID NO: 477 - DNA, 179 bp, Homo sapiens
aatcacatttattgatttgtttatgttgatccagtctttgttgcggatttttgcattgatattcttcagagatattcatcagagatattyatcagagatatttatcagaaataaaagaaaaaaaaattcttttttattgtgtctgccaggttttggtattgggctgattccagctcata

SEQ ID NO: 478 - DNA, 179 bp, Homo sapiens
tgcaaattaaaaaacaagtgaactcttccatttaaatagatggagaataaatatattattgtaaaaattaagaaaagaaatatacatacycatctggttatatattcatatttcaaggtgttaatggcagagtcagcaaatgaattattcatatggttaatcaagtaagtattgaaata

SEQ ID NO: 479 - DNA, 179 bp, Homo sapiens
ctgcacctggaaacttgaaaccagcacttttcagtccagtgttaatgtggaggccactggaggagaaccaagatactctagccaacagcmacctgacatctgagggaagccatacaggaccagccaacccctagctgacccaataacttatccagaagcagcagatgactacagactca

SEQ ID NO: 480 - DNA, 179 bp, Homo sapiens
ggattttaaattatgtttatgtggtaaatcacatttattgatttgtttatgttgatccagtctttgttgcggatttttgcattgatattyttcagagatattcatcagagatattcatcagagatatttatcagaaataaaagaaaaaaaaattcttttttattgtgtctgccaggttt

SEQ ID NO: 481 - DNA, 179 bp, Homo sapiens
cctcagcctcccaagtagctgaaattacaggcatgcaccaccacgcttggctaattttgtattgttagtagagacagggtttcaccataytggtcaggctggtctcgaactcctaacctcaggtgatccacccgcctcggcctcccaaagtgctgggattacaggcgtgagccaccaca

SEQ ID NO: 482 - DNA, 179 bp, Homo sapiens
tgtaaattagtacagccactatggaggacagtaggaaggttcctcaaaaaacaaaaaatagaactaccatatgatgcagcggtcccattsctgggtatgtagccaaaagaaaggcaatcagtgtattgaagagacatctgtactcctacgattattgcagcactattcacaataaccaa

SEQ ID NO: 483 - DNA, 179 bp, Homo sapiens
acccctctagccctcagcctagttttctttcaggccattccacagtagaaataattctaatttgaatccttcttctttctctttctcctyttctttcccttctctccttttcccctcctccccctgcgcctcctcccttcttcctttttcttggtggtggtctgggtacttcaggtgga

SEQ ID NO: 484 - DNA, 179 bp, Homo sapiens
tgaaacagatttccactagacacaaaacacatttccctgaaacacgtgcttttcaaaaagatgttgtttttgtttttttttttctttttycttttgagatggaatctcactctgtcacccaggctggagtgcagtggcgtgatctcagctcactacaagttccacctcctggattcaag

SEQ ID NO: 485 - DNA, 179 bp, Homo sapiens
aaagaatgcttctgagttgagcaggcaaattaaaatctgaaaaaaagccttttcaaatctaacaaataaaatcaagaatgatagctgggygtggtggctcaggcctgtaatcccagcactttgaaaggctgaggcaggtggatcatgaggtcaggagttcaaggccagcctgaccaaca

SEQ ID NO: 486 - DNA, 179 bp, Homo sapiens
aacatgggattccgaggagacaaatatccaaactacaccgctctgcctgaggacttttctctgaccacagggaacatgtataaccagcaygcaggacaacccagaagtgcggagttaacacccacagaagcaactcagcaaatgctggctgatgtgtccacggacatacacccggcttc

SEQ ID NO: 487 - DNA, 179 bp, Homo sapiens
catttccatctgaggtaccaggttcatctcactagggagtgccaagacggtgggcgcaggtcagtgggtgcacgcaccatgcacgagccraagcagggcgaggcattgcctcactcgggaagtgcaaggggtcagggagttccctttcctagtcaaagaaaggggtgacggatggcacc

SEQ ID NO: 488 - DNA, 179 bp, Homo sapiens
tcaccactgcttcagctactgacctaagggtggagggaatcttgttctatgggaagcttctattcttttgttttgttttgttttgttttkttttgagacggagtctcgttctgttgcccaggctggagtgcaatggcgtgatctcggctcactacaacctctgcctcccagggtcaagt

SEQ ID NO: 489 - DNA, 179 bp, Homo sapiens
ttacaggcgtgagccaccgcgcccgacctcaaacttctatattacattcaaattgcatcaaccagctatagatcttataggcctcaccamctttttttttttttttttttttgagatggagtttcgctctgtcacccaggctggaatgcagtggcacgatctcagctcattgcaagctc

SEQ ID NO: 490 - DNA, 179 bp, Homo sapiens
tttaaaatgctacaaaataaaataaggaaaaactaaggtgacaacatttaattatggaatctcactattttaccatttttttgaaatctrcaatttctttttaatatagggtacatacacatcagcattcttgcttcaagaaaatcacaaagtctaacgtaataaaaagaaaataaagg

SEQ ID NO: 491 - DNA, 179 bp, Homo sapiens
tcctccattggcttctcaccctgagtaaaaggcaaattgttcacaatggtctataacatcttaaatgatctgttccctgcctctcctggmctcatctgctgccattctccttatccccagttcatttatgttgacctctttgcagttcctccaataagtcaaacacacacccgtttcat

SEQ ID NO: 492 - DNA, 179 bp, Homo sapiens
gaatgggcagaattaagctgaagacaacaaaacggggaaagttaaagcaaaattgtgcattagcaagtccctctctaatagccttctgarccccctcttcccctcgtagctgctttgcatcctcatggagtccttcactagccaaggcttccctcaccaaggtaccccacttggatgag

SEQ ID NO: 493 - DNA, 179 bp, Homo sapiens
cggatcacgaggtcaggagatcgagaccatcttggctaacacggtgaaaccctgtctccactaaaaatacaaaaaaattagccgggcgtrgtggcgggcgcctgtagtcccagctacttgggaggctgaggcaggagaatggcgtgaacccgggaggcggagcttgcagtgagccgaga

SEQ ID NO: 494 - DNA, 179 bp, Homo sapiens
aaaggagtatagaactgtgtcacatatgtgcattcagaactttgggttaaattgcatttgtaaatatgtgtgtgtgtgtgtgtgtgtgtktttgtgtgtgtgtgcttatattctatttctgagagcaaaatgctacaaatggctacaaatgaactaagtgttcggctgatatcttggaa

SEQ ID NO: 495 - DNA, 179 bp, Homo sapiens
gttcttgactgggcaggagggggagcttaatgaatcttcaacttgaaatatagaactaatatggagccaatcagacaagagaacctgggyagggcagtctaggcactttaactgattcagtcaaggctcactaaactcatcacagcttggtagatctgacctgggaaacacagttattt

SEQ ID NO: 496 - DNA, 179 bp, Homo sapiens
agggtggactcattttaaaaccccagctgtttacaggctcctttctaggtcattggaagagttgttgccaccttttttgtattagtttcmcttggctgttgtaacagattgtcacaaatttggtggattaaaacaaaagacatttattatctcctagataagtctgaagtcatggtgtg

SEQ ID NO: 497 - DNA, 179 bp, Homo sapiens
attctgatttaataaaagaaaaaaagaaaaaaaagaagagactaaattggagatgtggtaggatcgagggtatggtgggtagagagtagkaaaatggagaagccctcctagctgagttttgcctgggattttgctactcatccagtttatcaacagcagttcacggtgggttctaaaat

SEQ ID NO: 498 - DNA, 179 bp, Homo sapiens
tcaacttcatgtctcatttgacttgcagcctaagaaattgtgaatctgttggtgttctccaggtttttataatagtggatttgaacaacsaatttcctatgaaatttaagctataatttccttttcaatgttacaacataccatattatctatcccaatatctggtttacaagcctccc

SEQ ID NO: 499 - DNA, 179 bp, Homo sapiens
atccagaacacttgggactactgaagaattccactttcaggcaaaagacaggaagtgtgaagacactgtctgggtgttaaaatcactgtrtttcataagaaacaaatagaaagatcaatccctcgatcagactctatctctcgttcttctacaccttctcttttattattttataaaag

SEQ ID NO: 500 - DNA, 179 bp, Homo sapiens
tttcctgactttttgatgatggccattctaactggcttgagatggtatctcattgtggttttgatttgcatttctctgatggccagtgakgatgagcattttttcatgtgtctgttggctgcataaatgtcttcttttgagaagtgtctgttcatatcctttacccactttttgatggg

SEQ ID NO: 501 - DNA, 179 bp, Homo sapiens
accatctcacaccagttagaatggcaatcattaaaaagtcaggaaacaacaggtgctggagaggatgtggagaaataggaacacttttayactattggtgggactctaaagtagttcaaccattgtggaagtcagtgtggcgattcctcagggatctagaactagaaataccatttgac

SEQ ID NO: 502 - DNA, 179 bp, Homo sapiens
tagcataagtaaattgcagatgctctagatttgcactgtccagtatatcatttaccaaatgtgattattttaatgtaaattatttaattwatttatttattttgaggaggaggctcactttgtcacccaggctggagtgcagtgtagcgatctcagctgtctgcaatctctgcctccca

SEQ ID NO: 503 - DNA, 179 bp, Homo sapiens
aaaatttcatttttcaaactggacagtggctcacacctgtaatcccaacactgtgggaggctgaggtggaaaaatcacttgagcccaggygtttgagaccagcctggtcaacatagtgatatcctgtctctacaaaaaataatttttcaaaaaagttagccagatgtggtggtgcctgc

SEQ ID NO: 504 - DNA, 179 bp, Homo sapiens
actccaaagtatgtgctgttatttaatgtttatgtattctctattatgaattgttttcaagttttttaaaatatcactagctagcctgtwcgtttcttaggaggcaaaaacaattgccttaaattttgttatattttagtgccattttgcacataggttataagcaacagataatttct

SEQ ID NO: 505 - DNA, 179 bp, Homo sapiens
gcgggatcttggctcactgcaagctccgcctccagggttcacaccattctcctgcctcagcctcccaagtagctgggactacaggcgccygccaccaagcctggctaatttttttttttttttttttgtatttttagtagagatgggggtttcaccttgttagccaggatggtctcgat

SEQ ID NO: 506 - DNA, 179 bp, Homo sapiens
atctttacggatagctaactcaagcctaactctccagagtttatgagtgagtaggagaggattacatattttaatttcatctgcccatartgatttccaacaaaactaacaaaagcctctagcaagctctttgccatatattttagcactatatgcatacgtacacatttgtgtgtgtg

SEQ ID NO: 507 - DNA, 179 bp, Homo sapiens
ttggtaaaaaaaaaaaaaggaggggagaagtttgcctttttttcattaagtagtcctaaaattatgaaagattttctaagattcagcttytagtacagttttgtaacagcttcaaggcaaaaggtaagactaggctaatatgccatgatgggagtttgaaagaagtgagaaatattgtt

SEQ ID NO: 508 - DNA, 179 bp, Homo sapiens
tatacatttggcaatttgaagatgattatatatctctatctatctatctatctatctatctatctatctatctatctatctatctatctstctatctctctatctgctttcctatctagatatagacacataaatatagatagatataattataccccccaacttttcaatgagtcctt

SEQ ID NO: 509 - DNA, 179 bp, Homo sapiens
atgaaagcgagagattctttttttttttttttttttgagatggagtctcgctctgtcacctagactggagtgcagaggtgcgatctctcygcctcccaggttcacgccattctgttgcctcagcctcccaagtagctgggactacaggcgcccgccaccacgcccggctaattttttgt

SEQ ID NO: 510 - DNA, 179 bp, Homo sapiens
tagaaaagtgctatcatacccattaatttctcaacattttggaaaatgtgttccagaaaatctaattgtcattttaaatattaattacaytttataattatttggtcataagcatactgcttcctgccaaagaacagggcaagagtagatgccttaaaagtagacgagaaatattaaaa

SEQ ID NO: 511 - DNA, 179 bp, Homo sapiens
tttgatatgtttcatagggtttaaataatgtaacaaacatgtgtgaaccccactgcccagcttcaagaagtagacatagctaatgtcttygaagctccctgcacgccccttcccagtggcactcctcatctccccaggataattatctcatctcttggattttgctttttttattcctt

SEQ ID NO: 512 - DNA, 179 bp, Homo sapiens
tacccagaaaaaacctaatgtcaagcaacattaatcattcatccataaaaacaggtagaccgttatcatgacagtacagaaatctctgtratttatttcaacatacaagatatatcacatttttataataatgtttaccttatctttgtttaataatttactcatagtcatgcaaacaa

SEQ ID NO: 513 - DNA, 179 bp, Homo sapiens
ctgtggttgtccttaatggctatggcagttagctggtaagttacagaagaaagtgtagacaggttttaatgtggcctaggaaatctggargccttatacttgcaaagaaaactgagggggttattttttgtgaaggggcattaatataggaatagcatgagaatggtgtgagacttcac

SEQ ID NO: 514 - DNA, 179 bp, Homo sapiens
aggttgaggacaattgcccactctgtgccatggtggccaaatcctgccaaacagtggcagatggtgtcttccccacagaccttctacaaktcacatggcaattggcctgggtgaatgttccagctccttcgtgactggtctatcccagtcaacctgccttaccactccctcccccactc

SEQ ID NO: 515 - DNA, 179 bp, Homo sapiens
ctttgaaaactggcacaagacagggatgccctctctcagcactcctattcaacatagtgttggaagttctggccagggcaattaggcagragaagaaaataaagggtattcaattaggaaaagaggaagtcaaattgtccctgtttgcaggattgtttagatagacattgcaatagcaa

SEQ ID NO: 516 - DNA, 179 bp, Homo sapiens
gatgaaatgaatgaaatgaagcaagaagggaagtttagagaaaaaagaataaaaagaaatgaacaaagcctccaagaaatatgggactaygtgaaaagaccaaatctacatctgattggtgtacctgaaagtgactgggagaatggaaccaagttggaaaacactctgcaggatattat

SEQ ID NO: 517 - DNA, 179 bp, Homo sapiens
tgtactctagcctgggcaacagaatgagactccctctcaaaaaaaaaaaaaaaaaaaaaaaaaaaacaaaacaaaaagcaaaaaaaaaamaaaaaaaaagaaaagaaaagcaggattttggggactcacgagggaagatcgggacggagtaagaggtaaaagactatgtaatgcataca

SEQ ID NO: 518 - DNA, 179 bp, Homo sapiens
tacctaattacactgtaggactcaaatcaaatggactatactgagggacttgtactttaaatcagctcatttcaataaaatttaatgtaytcataagtagtaaaattaagttgcttcatcacttggtatttagtttttgtatgtacttgacttgaatttcaaattcaccaatatcgatg

SEQ ID NO: 519 - DNA, 179 bp, Homo sapiens
atgtcttctttgccatcttcctcatttcatggtttgtctccttattaagatcacaaggtcctggtggatagaaaatatatattatttctrtactcatcacagtgacttggcagtcttgaaagtaaaaaaatttaagaaggtgtagcattaaactagttgtaagttattatgtttttcct

SEQ ID NO: 520 - DNA, 179 bp, Homo sapiens
tcctggattctatggttctgtctagtagataatgcagaaaacacttgaatgaactttaagaaccaggcaatcactcactgccaagatttyccaattgccaatactttccaatttcatcaagcataagtagcagaaagaggatagtaaatacctcctactatggttatttatatatgcaa

SEQ ID NO: 521 - DNA, 179 bp, Homo sapiens
gcagtagcatgatcatggctcactgcaacctccgcctcctgggtacaagggattctcccacctcagccgcaggagtcgctgacaccacasgcacatgccaccatgcctggctaatttttgtttttgttggtagagacggggttttgccatgttgctcaggctggtctcaaactcctcca

SEQ ID NO: 522 - DNA, 179 bp, Homo sapiens
agaatggcgtgaacccgggaggtggagcttgcagtgagctgagatggcgcaactgcactccagcctgggcgacagagcgagactccctcwaaaaaaaaaaaaaaagaaagaaaagaaaaagaaaagaaaaaagacgcatagatggtactattctccggtctctaagaatactttctcac

SEQ ID NO: 523 - DNA, 179 bp, Homo sapiens
agattatatcccgcacctggcttgaagggtcctacacgcacggagtctcgctgattgctagcacagcagtctgagatcaaactgcaaggyggcagcgaggctgggggagaggcgcccgccattgcccaggcttgcttaagtaaacaaagcagcccggaagctccaactgggtggagccc

SEQ ID NO: 524 - DNA, 179 bp, Homo sapiens
atcaagcaaaattatatgttaggaaaaaataatacagaaaaccaagtagagtttatcccaagtatacaagcatgtggcaaattgagaatmtctagtaatataattcaatatatttaacacattaaaaaagaaaaattcttgtcatattcagtagatagagaaaataatttgatatcatt

SEQ ID NO: 525 - DNA, 179 bp, Homo sapiens
ttgacccatatagtttgctgatcctggtgtataccataaacatgagcaaaatgacctgttaagtttgtttagattctatgcagatgcaascaccaaggtaaaaatttagctaggaagttacagttgttcccctgggacattaaaacatctttgcaaaaatgtataatagaatcaatttt

SEQ ID NO: 526 - DNA, 179 bp, Homo sapiens
cttccctcccccactaagtccatccctccctcccccaagctaactttgccaaacacctgctctgttcttcattcgcatggagggcccacsttggaaattttctgctcttcctctctttatttcttcctccagctgcgctgagcccctcacctttatttgttgtcattatgctgatcaat

SEQ ID NO: 527 - DNA, 179 bp, Homo sapiens
tgtagcttagagttctttgagacataaaattgaaatcactattaatcctttccctcaactggctgtcttcacatctatttttttcttacragtcatgtactgttatccctatgaaaatagtttagatgatcatgtaattcttttattaagtaaacagttttgttatcctctgaagagga

SEQ ID NO: 528 - DNA, 179 bp, Homo sapiens
tagcagtgacagacatcacccagctcctatgcagccactaaggccagtctcactcccactatgccccccaaccacactgagtttatatayaggcagctggtgggcagggctgagatcttgccccaggctacaatcctccccactgagaaagcacacagggctctcaggctttgctgctt

SEQ ID NO: 529 - DNA, 179 bp, Homo sapiens
tactttcccttttctcccaggcttggataaataatgtaacctatgaattgaacagacttttcacaatgtgagaacttccctccaatccartaactcagtatatattgaactaataaaccaaacatggtaagagaacaacctctttctcaggttgatggaacatatcaggcattggaaag

SEQ ID NO: 530 - DNA, 179 bp, Homo sapiens
cttattgcttcaatctgattatatttcagtacccattaactattccctctttactcctttctctccactacccttcccagcctttggtartcatcattctactctatctccatgagatcaatttctttagttcccacatatgagtgagaacatgcaacatttgtcttttcatgcttggc

SEQ ID NO: 531 - DNA, 179 bp, Homo sapiens
agagtttatcccaagtatacaagcatgtggcaaattgagaatctctagtaatataattcaatatatttaacacattaaaaaagaaaaatkcttgtcatattcagtagatagagaaaataatttgatatcatttcaaatctattcatggttaaaacacacacatatatttcaccaactag

SEQ ID NO: 532 - DNA, 179 bp, Homo sapiens
acaattgtttttataatacagttattttaaagtatttttaaatagaaattttacaagattatttgaatccagaaatattactttataagrctggaattttacattattaatgtaaataataatacctacatcatagagatattttaatatttctgcattgtcagggctctttgagcaga

SEQ ID NO: 533 - DNA, 179 bp, Homo sapiens
ttgtatgttatatatgttgtaatcacatttatgaaaatggatttgcccaacaaaacaccactatccaaatctatataattttaaactgcrtataagtgactagctcattaattcatatatcaatgttttatggagcctctaccaagtggtgctgggaatgagaaggtaaacaaacaggt

SEQ ID NO: 534 - DNA, 179 bp, Homo sapiens
acttggttactcacttgttgtacttaaaaatcagaaagagagggcattcttgtggggggaaaaataaacagaagaattagggatgctggrggggagcaaatagggaaaggcattaagatagcagcacaatataattttgctccacttacttttcaaattacatcttgtaatttggcagt

SEQ ID NO: 535 - DNA, 179 bp, Homo sapiens
ggagaacataggctctcaaggcccttttctgtcatataacagaaataacaacactacccaatgctacctaatgtagaataatattacttwgcaattataactcaatgattaatttaggttttgatttaaaaggtctaatttgcattcatttactagaatcctactgatttttatcataa

SEQ ID NO: 536 - DNA, 179 bp, Homo sapiens
acatctcagcctcttggggctgtctgtagccatataaggagctggtcaagagctatttatcagaaaagttcttgagggcaaagagaaccyacagggcacttcaattagctgagcagtccccagctctgatgtgcctgcagctgtcaccaggaaggggtatcaactattcaaatggcact

SEQ ID NO: 537 - DNA, 179 bp, Homo sapiens
atttttttcaaattatttcagcaaggatctgttgagtccttattatgttgaagtacgaacttttaggtgctttagattcagagataaatrtaacctattctctgtcaccaagatggtttcagtctagtagagaaagatgttaaaaaacaaaaatacaaaaaaacaggcgaagcgagatg

SEQ ID NO: 538 - DNA, 179 bp, Homo sapiens
ggttgaggacccttctctttgctaaagctgtggctgttcccagccttgcaggagacagttgttggccaggcctaatttgtttggctcctstccggtcatgggtcaagataactgcgacttccctgagagattcactcctttaacagcatgcacataaaccattttgctggaagactttc

SEQ ID NO: 539 - DNA, 179 bp, Homo sapiens
tttccatttaaagtgagctctacacccagctagatgagcagctggtctaagttgtcaccattttttaactcttgtgcccacttgccaccwatctgtcattcctgtttgacgacaccagtcatctgcatggcagctggcagatgctaaagactagcaggaagacctcaggactgtgggcc

SEQ ID NO: 540 - DNA, 179 bp, Homo sapiens
tatatatataactgatagtagttgcttatataagtcactacttaccatgtgtcctttggtatctacatataaaatgagacacagtggatrtgtgatctgtttttgttttagagaagcctttatgcaacaaccagggagatcctaagcctgaaaccataagtattggaaacacaaatgtt

SEQ ID NO: 541 - DNA, 179 bp, Homo sapiens
gttttctttgctacacagaagcatttcagtttgacgtagtcccacttgtgtatttttgcttttgttgcttgtgcttttggtgtcatatcyaagaaatcattgctaaaactaatgtcatgaagtttttcgctcctttactttcttctaggagttttgtagtttatatttaaatttttaat

SEQ ID NO: 542 - DNA, 179 bp, Homo sapiens
tcattcaaagtatctccttttcattactaaagttttgtaggtttctgtcttaatagttctgcatagcagttactgtttattcctaagtawtttttgtttctgctatgagtttctactaccctaaacagttgcccagctttcagtaagtccttcccacatccacacatacaaattcactc

SEQ ID NO: 543 - DNA, 179 bp, Homo sapiens
ggctcttttcataggacaagatttttctccttgatacatgtgtatagaaaaaaataatggacagtgctactcaatctcaaatctttctartgcacttggtttagccacataacttcttaaccttcatgtgtctgttttataaggtttcattctgcttccaaaattataccaaattattg

SEQ ID NO: 544 - DNA, 179 bp, Homo sapiens
ccaggcttttcttgaactcctgagctcaagcaatctgcccatttcggcctcccaaagtgctgggattacaggcatgagccaccgcgcccrgccctgtacagtttcaataagaatgataaggatcgtgagctttgaacctaaagagagcaggctgaaaatacagaacctcatttaaattg

SEQ ID NO: 545 - DNA, 179 bp, Homo sapiens
cacggtggcttatgcctgtaatcccagcactttgggaggctgaggcaaaaggatcacttgatcccaggagttcaagaacagcctgggcawcacagtgagaccctgtttctacaaaaaaagaaaaaactagccggaggtggtggcacgtgcctatggtctcagctactcaggaggctgag

SEQ ID NO: 546 - DNA, 179 bp, Homo sapiens
tgcctggctaatttttgtatttttagtagagacagggtttcaccatgttggccaggctggtcccgaactcttgacctcaagtgatctgcycacccccgcctcccaaagtgctgggattacagatgtgaaccaccttgtcccgtcctgtctaacccactttcaacatttaaaaacctcca

SEQ ID NO: 547 - DNA, 179 bp, Homo sapiens
cttaccttctttaacaagtgtcatgaatgacttttcttttaacaaaatccagcctattgcctgttttcatacagctggaaagctaagaaygatttttacatcactacatggttgaataaataacaagatgaataacacctaataaagtgcattaaagtatgccattcactactctaaag

SEQ ID NO: 548 - DNA, 179 bp, Homo sapiens
ataacattataaatccttaaaaaaacatgtggtggtgacaggatcatctgtgcaacctcctcccttccttgctaacagtttttgttcagrtgttgggcagccttgtgttacaaatgacttctgaccccagagtagtctaaatcgctaatagtaatttcactgtcttgccactaactttt

SEQ ID NO: 549 - DNA, 179 bp, Homo sapiens
tgatcatgccgctgcactctagcctggatgacagagcaagaacctgtctccaaaaaaagaaaggaaggaaggaaggaaggaaggaaggargaaagaaaagaaagaaagaaagaaagaaagaaagaaagaaagagagagagagagagagagagagagaaagaaagaaagaaagaaagaaa

SEQ ID NO: 550 - DNA, 179 bp, Homo sapiens
tgaatagataaaggagtgaaaggtacacatcaaactattaacattgattttggagaaacaaaattgacttaaaatatatatatatatatrtatatttttatattgcttgagtactttgtaatgagatgtgtgtatattttgcttgttgtctcagcccacgtcatctagaaagtagagca

SEQ ID NO: 551 - DNA, 179 bp, Homo sapiens
gcattccattgtttcctgacatctagtttttgagtgaaaaaattgctctcaaattgtcattccctttaggttatcttccatttccctctkatagcttttaagatttttctgtttcttttggaggaagcttggtttggatttgtttccatttatctcactcagatcatacagtatattct

SEQ ID NO: 552 - DNA, 179 bp, Homo sapiens
ccagcactttgggaggccaaagtgggagaatcacttgagcccaggaattcaagaccagcctttgctacttagtaagacttcatctctgcmaaaaaaaaaaaaaaaaaaaaaaaaattagctacgtgtggtaatgtgtgcctgtagtcctagctatttgggaggctgaggtgggaggatc

SEQ ID NO: 553 - DNA, 179 bp, Homo sapiens
taggaactactcagggaggccactgatagtagtgagtgaaaaatgcccctccaagagtaaaagaactgagtctctgctgccagttaaaarcgatagatatagtctgctgatgcattagttcacgttagacttttttttttttttttttttttttttgagacagagtcttgctctgttgc

SEQ ID NO: 554 - DNA, 179 bp, Homo sapiens
gcaacagtgaatcttccaactaatattttacttttacgagacccttgatttgaacgttctgcctgaataagcactagacaaatcctttaygtaaacctctctgatcaaaatttcctaaaggcttctgcactatgaaaagagataacacctttaagtcatcattaggtactagccataaa

SEQ ID NO: 555 - DNA, 179 bp, Homo sapiens
ggcttagggacacctgagatactgtttctcaactactaactgtgtgatcttcggaaaaactcttaccttctctgagctggagtggcaggkggtactgggagatgactgggagagatgggtgtgacaagtattaaaatccaggtgtcacacattacatttcacaactacttttagaatag

SEQ ID NO: 556 - DNA, 179 bp, Homo sapiens
ctgccgaaaaagacaggggcaagttcagtgaggttcgagcaggtgacacatgctccaactctccttacctcccagcaatccagaagtgaytctcaggatgctggatcctggggcaagtgactgggaaatgttgaagcattgcttgtcacttgttagccacattagccacctgccctgac

SEQ ID NO: 557 - DNA, 179 bp, Homo sapiens
tgcattctgccacatacatcatccaagtgcaagagtctctcacattataatttttggctgagaactcaatatacacatgactgggttatkgttaactgagtattgttcattctgggctgggaaacctttactgacaacagtggaacatttggatgtggaattctctgccatggaaaata

SEQ ID NO: 558 - DNA, 179 bp, Homo sapiens
acctatacaaaaacattagtacatttttgccaattttctgtaagtttgaagttatttgaaaataaaaagttaaaaaaataattcagcaamcccatttggaatttatcttaagaagcaaagccaacaggtactaaatatgaatcaatgacaattattcagtttctagcttcagtaatgga

SEQ ID NO: 559 - DNA, 179 bp, Homo sapiens
atcctttgcactatagcctagatgccttctcaggactcaggaaaatgaaggtctgttttgttgctatcaattttaaattctggcaacaaygttgaactctaaatcaggttggaatctttcttaagttttcttgagattaaagagctaatgctgtttaaaatccacttaaagtatgcctt

SEQ ID NO: 560 - DNA, 179 bp, Homo sapiens
aagcttcttcctttgtaatgttagaatgttcccaatgagatggcatgtctcatgattgacattgtagcttcctagagattagagaaattwcaagtcttctagagcctgccaaagttgtaccattcctctctatcagggtaggataggatatgctggtgtaacaaacaactccatataaa

SEQ ID NO: 561 - DNA, 179 bp, Homo sapiens
ggactgacacctcacatggccgggtactcctctgagacaaaacttccagaggaatgatcaggcagcagcattagcagttcaccaatatcygctgttctgcagccaccgctgctgatacccaggcaaacagggtctggagtggaccgccagtaaactccaacagacctgcagctgagggt

SEQ ID NO: 562 - DNA, 179 bp, Homo sapiens
gcagtttgcacagggaagcaggctggtgtacctgaggaatatgtactgccttaggtataacaggtatgacatttattgtcaatgaaatayagaccatatttttttttaccccacagaggtgattctgaatctaatccctgctgcctcttcaagttactaagttattcttgcgtactccg

SEQ ID NO: 563 - DNA, 179 bp, Homo sapiens
ctggcatgtgatgggtactacagatatatctgctattttaggattaagaaagagaatttctttctaatacaaagagttgaaaaagcggartacgcaagaataacttagtaacttgaagaggcagcagggattagattcagaatcacctctgtggggtaaaaaaaaatatggtctatatt

SEQ ID NO: 564 - DNA, 179 bp, Homo sapiens
gacttttccagacatagatttggatcccacctttgatatttactcagtaatttggcaacagttgctccttggtttcagagatctaatctrcaaaacatggatagtacttctttattggattattgtgaaattaaataaagtagtacatgtaaatgtttagaacagtgcctgacatatag

SEQ ID NO: 565 - DNA, 179 bp, Homo sapiens
ggctcaagggatcctcctgccgtgacctcccaaagtgctaggttcacaggcatgagccaccgtgcctggccttaacccatttttcccccygagactgagtcttgcactatcgcccaggctggagtgcagtggcattgatcttggcccactgcaacctctacctcttgggttcgagcaat

SEQ ID NO: 566 - DNA, 179 bp, Homo sapiens
aaactccaacatcaggttataaagaagtattttcttcccacttcttttcctagaataataactgcctgaccaatcaatctattgagatcygtatgagaccatgtatgtgaatggagtttgccgagtattaaagattatataaaacaaaggagcagcattttagctattatgggctgctc

SEQ ID NO: 567 - DNA, 179 bp, Homo sapiens
tggttatgtgaccaatggccttttaaggatgaggcttggccaggcacagtggctcatgcctataatcccagcaccttgggagactgaggygggaggatcacttgaggccaggagttcaaactcagcctgggtaacatagtgagagaccccatctctaaaaaataaaaaataaataaagt

SEQ ID NO: 568 - DNA, 179 bp, Homo sapiens
gcaatatcataattgtttttgaactcaaaggcctaacatataataaaagcatagttaactaaggaggcgtgtgatcctcttatcagtgtmtatttgcataatttgcaagcagtctctgagtttgctatgatgatgtgtaaacagagggtatttgttcagttggaactttgtgctgtgga

SEQ ID NO: 569 - DNA, 179 bp, Homo sapiens
tatttaataaatcaaattgtatttaaattttctcagaactatatgattattcattcagaaataattctatggaaagccatcacaatttcrttatcatttaagtaatttaaataagcatgtacaagtataaccacagaaatgtacctgttgacatactttaatgaagagattggcctatt

SEQ ID NO: 570 - DNA, 179 bp, Homo sapiens
cgaagctgcagtgagccatgatcatgccactgcactccagcctgggtgacagagcaagaccctgtctcaaaaaaataaaaatgaaaaaartctgtgttcccaagttccaagtgatgctgatgctgctggttgcctttaagcatctcacaaagaacgaactcataaatgctaatacagta

SEQ ID NO: 571 - DNA, 179 bp, Homo sapiens
ttggctcatcctattataccaactcctcagaaggccaaggtgggtggattccttgatctcaggcgttcaagaccagcctgggcaatatcrtgagactccatctcttaaaaaaaaaaaaaaaaaggattagccaagtgtggtggcatgaacctgtggtcccagctacttaagaggctgag

SEQ ID NO: 572 - DNA, 179 bp, Homo sapiens
tcacatccatttggttttctctagagctgtagttctcaaccttttgtgtggtagagaaacacctagagaacatgtttaaaaatatcctgsgttccacccttgagagataataaggtccaaggggaacccaaatatctgtgtttcaggtcagcttattggctcatcctattataccaact

SEQ ID NO: 573 - DNA, 179 bp, Homo sapiens
tgaattgtctaatagaaaagggcaaggaagtagaaaataagaaatcatcatcagaagtggtttgttttggaattatattgtccagctgcrtaacaaatcacccccaaaattgagtcgcttagaacaacaaacattgatcctccacagtttctgtgtgttaggaatcaaagtgatttaat

SEQ ID NO: 574 - DNA, 179 bp, Homo sapiens
cgcttagaacaacaaacattgatcctccacagtttctgtgtgttaggaatcaaagtgatttaatttaatggttctgctcagggtctctcrggggctgcaatccaggtctcaggctgggatcctttcaaggctgagctggggaaagatccatgtctaagctcactcacatggccgatggc

SEQ ID NO: 575 - DNA, 179 bp, Homo sapiens
aatacatgtcaaaatatacttggatttgtaaaaaatattccttcctgtttttttcaccatagatagatgtacaaaaatgtccgtgttcayaccgtggaaaggacatttctcataaactcacacagagatacctttcaagtcaatgccttagaaagcaatgagagatttaaaggagacct

SEQ ID NO: 576 - DNA, 179 bp, Homo sapiens
ggaggcggagcttgcagtgaccagagatcgtgccactgcactccagcctgggcaacagagcaagattccacctcaaaaaaaaaaaaaaawaattaaaagctaactctaaacttacatttttttttgtaatacaccatgcttttgggggaaattctcccttctgtaatctaaacaacctc

SEQ ID NO: 577 - DNA, 179 bp, Homo sapiens
aaatttttttaaaagaacaagtttgattagatatctctaagaaaaagagaatatatgtatttttcaaactttccaaattaaattaaccasgtaggaaatttgaatttgtagcaaattctaaagaatatgtcatatatgctacacatatttttcttttaaaaaaatgttttttctgtctt

SEQ ID NO: 578 - DNA, 179 bp, Homo sapiens
ttctggcaattgtgaataaggttgctatgaacattcatgcatcagagcctgttaacttttcatttctcttggataaaaatctaggaggakaattactaaatcatatgtaaagggtatgtcaaccttataataaactgtcaaactgttttccaaagtgattgtacatgtatcctgccaaa

SEQ ID NO: 579 - DNA, 179 bp, Homo sapiens
gaaaatgatcacactgccaaaagcaatctacaaattcaatgcaattcccgtcaaaataccaccattatttttcacagaattagaaaacasaattctaaaattcatatgacaccaaaaaaagaacccacatggccaaagaaagcctaagcaaaatgaacaaatccaaaggcatcacatta

SEQ ID NO: 580 - DNA, 179 bp, Homo sapiens
aagaactaggaaaacaagagcataattaggaaatcctttgttccagggcatgatgagatgaacttgccttataaagtcatttatcacaamcctaagttgcataaatgtaatgataaaaggtccattaccaaatttgcacttggaaatcatttcaagataccctccctttgtggagcggg

SEQ ID NO: 581 - DNA, 179 bp, Homo sapiens
tgcctaggacagtccctgtgtaggctgattgtaattatcctgatgtaattgtgatgtaattatcaacaattccgccctctctttttactytcaaaaagttttggtttgaatctgaggtggttaacactgactctttacagtgaaggttaaccagaatcaccaagaaattacatatgtat

SEQ ID NO: 582 - DNA, 179 bp, Homo sapiens
ctcctgtaatcccagcactttgggaggccgaggcgggcggatcatgaggtcaggagatcgagaccatcctgcccaacattgtgaaactcygtctctactaaaaatacaacaacaaaattagccaagggtgatggcaggcacctgtagtcccagctactcgggaggctgaggcgggagaa

SEQ ID NO: 583 - DNA, 179 bp, Homo sapiens
aaattaagtttctgccacctgaaggaatggggctttgtaaaagaaattaagaccagttacagaaaaagagaaagttacaattcacatggractttgacagtttccataatgttttctgtttaaaaagctctggagtaaataaggcaaaatgatacttaatcaagctgggtggcaggtgt

SEQ ID NO: 584 - DNA, 179 bp, Homo sapiens
aaacctattgaaatttaaagaaaaagaaattgctaccagaagcaatgtcttgtaattacaacttcaatattttaacaaagacatttactrttatgttataactggttgtagacaatcacctctgaccacactaatcccaaaagtaccatatatcagagacaacaaatatagccattttt

SEQ ID NO: 585 - DNA, 179 bp, Homo sapiens
tagttatatcatattgcattattttgttgtcctactaggtttgagagttagtcatactttggataacatttatggagcttccatacttcyaaaaggtggtcataattttgttttgcttgaatgggagaaaacataatcgttgtatatttaaatattttacatctctcaactagatgaaa

SEQ ID NO: 586 - DNA, 179 bp, Homo sapiens
ttggtgggcgatgtaagaacaaggcttcctgctcaagggagaagaaattgagaaaagatgcaaagtagtttttgacaggggtgtttctarggtgggccctgataaattaagaggatcggaaagcaaagatgtctgtgccttctgtttcaagatagggcacatggaggcagtgacaccct

SEQ ID NO: 587 - DNA, 179 bp, Homo sapiens
ggcggagcttgcagtgaccagagatcgtgccactgcactccagcctgggcaacagagcaagattccacctcaaaaaaaaaaaaaaaaaawtaaaagctaactctaaacttacatttttttttgtaatacaccatgcttttgggggaaattctcccttctgtaatctaaacaacctccct

SEQ ID NO: 588 - DNA, 179 bp, Homo sapiens
agaaggaggaaattaaaagatgcattgataaagcagtagggtacaggagttatgcaagcaatagtttatgtaaagccacagagagagtgscttatgccagaaacagcaggtccttccaaatttctcaagctttgtccttgctaacagtaagcaagcctaggaggggatgcttgaagaac

SEQ ID NO: 589 - DNA, 179 bp, Homo sapiens
cggctttctgaaacatgggcatattctccgccacctgccccctactctcctcttatcccaggccggcgtcaggaggaggaacgcgcatcrgttcccaagcagtaggaagaactggaaggccttgaaaggcaatgcgcttcctttagaataacagtttgggcttggagtttcaacaggag

SEQ ID NO: 590 - DNA, 179 bp, Homo sapiens
acaaaaatgctagtgactaggaaaatgtaaatcaataaaataccatttctcatacactaggatggctataattaaaaaaacacataatarctagtattcatggggacatggaaaacatgctagtaggaatgtaaaatggtgcagtcactttggaaaacagcctggcagttcctcaaaag

SEQ ID NO: 591 - DNA, 179 bp, Homo sapiens
ctggggaggcctcaggaaacttacaatcatggcggaaggtaaacagggagtatcacctcacgtggccacagaaggagccaaagaaaggtragggggaggtgccacacacttttgaaggacgagatctaatgagaactcactcactatacagtaccaactgcggggtcggggggcagggg

SEQ ID NO: 592 - DNA, 179 bp, Homo sapiens
gttttcggttacatgaataagttattttgtggtgatttctgaaattttggtgcacccgtcacccaagcagtgtacactgtactcaatatrtagtctttttttcctcacctccctcccacccttcgccccaagtccccaaagtccattatagcattcttatgcctttatgtcctcacaga

SEQ ID NO: 593 - DNA, 179 bp, Homo sapiens
cacagttccacatggctggggaggcctagggaaacttgtaatcatggcggaaggtgaaggagaagcaggcaccttcctcacaaggtgggragagagagagcatgcttgaaggaggaagtgccacttttttcaaccatcagctctcatgagaatttactcactatcatgagaacagcatg

SEQ ID NO: 594 - DNA, 179 bp, Homo sapiens
ggacagagaaggacagagtacaagaaacaaggaggaggaattacatttttaaatgcattaccaattaaaagaaaaaaaaatcagtgtaawaataaaggctttgcctctaactagttttgtgactttgggcagccattccacttccttggcctcagatattgggcacagtaacttccagg

SEQ ID NO: 595 - DNA, 179 bp, Homo sapiens
aacagccatgttgctcacaaaaaagaaaagaaaagaaaagaaaagtagaaatgcaatcagtcagaatatgatttcagaaatccagaagamaaatgttgtgcatatgaatccaatgacagagagaagaaaggagatggatttgagagatttttaaggtatagaattggcaagatttagtt

SEQ ID NO: 596 - DNA, 179 bp, Homo sapiens
tgtactcactctttgttaagtcccaaaattaccattgttcctggcccggacttcaatctggcctcccgcattattcctgataccacatcygacctccatgactgtatctctctgatccacctgacattcaccccatttccccatatttccttctttcctgttcctcaccctgatcaccc

SEQ ID NO: 597 - DNA, 179 bp, Homo sapiens
ttttactattcctttgcacccttcatcccagcctctctttgctttcacttagactgaccctgacacccattaggctcagcaaattacctyggctgtactgctgcaaggcttcacagacagcccccattacttcagtcaagccaaaatttcatcctcatctgttacctatctcagcataa

SEQ ID NO: 598 - DNA, 179 bp, Homo sapiens
aactctcaggaaagaaattctattcataagcatggaatgttttccattcattttgtcatctctgatttttttcaataattttttcttttyttctttttctttttttttcaattggagtctcactctgtcacccaggctgcagtgcagtggcacgatctcagctcactgcaacctccacc

SEQ ID NO: 599 - DNA, 179 bp, Homo sapiens
aattacggacaagctactgtgtcttaatatcaagctaaaaattccctggtccactgatgcaagacttattttactcaaattgtgaacaaraagacaagtggtaaattaggagggaaaaaagtgaagcaacttttattaaataccatgcaaccatctggcaccactccgcaaagttgatt

SEQ ID NO: 600 - DNA, 179 bp, Homo sapiens
ttgcatgtggatcaaccatcgctttattggctgagatatgaacatattgttgaaaggtaatttgagagaaatatgaagaactgaggaggraaaaaaaaaaaaagaaaagaaccaacaacctcaactgcctactccaaaatgttggtcattttatgttaagggaagaattccagggtatg

SEQ ID NO: 601 - DNA, 179 bp, Homo sapiens
aatttaatctttgtggcaaaaaaaaaaatcctataaagcagcagctaatggcacatttgtacttttccatttttatgtcaagcttcattwaaaaaaaaattgtaaaatattgtaggggtgtaatggggtccctgagaccatcccttgcttggagattccctaaaatgatccatgggagc

SEQ ID NO: 602 - DNA, 179 bp, Homo sapiens
cctgaaaagaaagaaggaagggaagggaagaggaggggaggggagaagaaagagagaaagaaagagagggagggagggagggagggaggraggaaggaaggaagggagggagggagggagggaggaagacagaaagaaaaagagaaagaaggaaagaaagaaagaaaagaagaaagaaa

SEQ ID NO: 603 - DNA, 179 bp, Homo sapiens; identical to SEQ ID NO: 549

SEQ ID NO: 604 - DNA, 179 bp, Homo sapiens
gagagagagagagaaagaaagaaagaaagaaagaaagaaagaaagaaagaaagaaagaaagaaagaaagaaagagaaagaaagaaagaarggagggagggagggagaggagagaaagaaaaaggaaggaaggaaggaagagagagagagagagagaaagacctagtcaccaaaagcaag

SEQ ID NO: 605 - DNA, 179 bp, Homo sapiens
aaaacaaactcatcatatgattacaagaaagtaaatttctgtatgaagagcagatcacttatgtgtatgttcaccacatgaacctacatmcacacacacacacacacacacacacacacatagaaacacacacacccacagagtctttaaagacggactttattttatgctgtaaacct

SEQ ID NO: 606 - DNA, 179 bp, Homo sapiens
ttcaaactgcattaaatcccctcctatagctgtcactgccaagcagttgcactggctctgtcctacctttctgttggtaattctgttttwaatcctgtgcttcagtgtagtttatataaatctttacagagggataaaacttcctgtaattaattgtttgggtgaacatgtacctggga

SEQ ID NO: 607 - DNA, 179 bp, Homo sapiens
catcaactgaatgaggtcagcatgtctattcagcttcgtttattttcaagaataatcacgctttcctgaatccaaactaatccatcaccrgggtggtttagtggctcaacattgtgttcccatttcagctgatcagtgggcctccaaggaggggctgtaaaatggaggccattgtgtga

SEQ ID NO: 608 - DNA, 179 bp, Homo sapiens
caccaaaagcaagagattttttaaatgctactattttttgggcatttactaatcatattgctatgctctgcacccaagctaagtaatttraataaattatctcatgtactcctctaaaactaattactgctgtgtaaatggaggtagaaagaaactaagctttatttctgcctctattg

SEQ ID NO: 609 - DNA, 179 bp, Homo sapiens
actcatcttgataaactactgcatcgattgtggctacactcccctgctcccacatcttccatagaccccactgtctgtaaaataatattyagtctggcctcaacctgtctttccagcctcggtgacacaggtctattctgcctgagacacttactatgacacccttgcttgttcctggg

SEQ ID NO: 610 - DNA, 179 bp, Homo sapiens
aacacaattgcagttaagaattccatagatctttttttttagaaactgacaaggtgattctctctctctctttctcacacacacacacamacacacacacacatcttagattactatatatttgtgaaaaacatacatatatttgtacatgcgtgtacaaagaatgtaaatagttgaaa

SEQ ID NO: 611 - DNA, 179 bp, Homo sapiens
cattgtaacaggggtctgactcactagtttaaaaaaaaatctgagaacgatgagacccaaggggacaacagagttccaaaaaaaaaagawagaaaaaagaaagaagaaagaaagcaagaaagaaagcaagaaagcaagaaagcaagaaagcaagaaagcaagaaagaaagaaagaaaga

SEQ ID NO: 612 - DNA, 179 bp, Homo sapiens
aacgtcgaagcccaagaataagagtcaatactcctaccagaggtttacatttttcccaggggtctaggtggatattcctgggaacccccrtcaacacaggcatctacagtacaatccaggcctcctgttttcagcaggggctgcaagagcactgcagccttttccccagaggtgtcagt

SEQ ID NO: 613 - DNA, 179 bp, Homo sapiens
catttttgccctcttccatcttgaaaccctggaaacccttgcttccgccaggggaggttacttagtatctgtcaccccaagggaaccaasgtcgaagcccaagaataagagtcaatactcctaccagaggtttacatttttcccaggggtctaggtggatattcctgggaacccccgtc

SEQ ID NO: 614 - DNA, 179 bp, Homo sapiens
aacatgcttcaacctatattttctaaattgtttttctttaaaggtgaagacttctgagcttgaattatccccttgtcagtgggctttccrtgctgtccaagtgacctaagtgataatcaacctccatttcattttgagaatggttgtggtattttagagctatggtgaataagaaaatc

SEQ ID NO: 615 - DNA, 179 bp, Homo sapiens
cctcctccctgaagccccctcctcatcatattccagtgcgtgtccaccactttggggccaggtctacacaactgcagtgattcaggtcaygggagaaaacccaaacaagcacaaaacatgcttcaacctatattttctaaattgtttttctttaaaggtgaagacttctgagcttgaat

SEQ ID NO: 616 - DNA, 179 bp, Homo sapiens
tcctgcctcctccctgaagccccctcctcatcatattccagtgcgtgtccaccactttggggccaggtctacacaactgcagtgattcargtcacgggagaaaacccaaacaagcacaaaacatgcttcaacctatattttctaaattgtttttctttaaaggtgaagacttctgagct

SEQ ID NO: 617 - DNA, 179 bp, Homo sapiens
ccctaagatataggtactatcataccgcatcttacagataagaaacttaggcacaaagaggtttagtagtttagatgagataaccctgaygagcagagattcgaacccagcctccatgctattaaccaggacatcatattgcctttcatacatgctcttcaaaggcaacacagtaatcg

SEQ ID NO: 618 - DNA, 179 bp, Homo sapiens
gtgcctcatggtaataaactccagaagcctcattgacttgctagagatgagctcatccttcttgcttgcttaatggcaaaatacaaaatmagcagtcactgacatggaacgatttcaggaatgccaaaaggttctccttttccaaaatatctcttccatcttcccaatactgttactga

SEQ ID NO: 619 - DNA, 179 bp, Homo sapiens
gtctctcctagtttctggtggtttgctggcaatgtttggcattctgtggattgcagctacataactccactctgcctccatcattaatgrccttctgcctgagtgttttcatatgaccatcttcatataaggacaccagtcatatttgatgagggttccaccctactccagtatgacct

SEQ ID NO: 620 - DNA, 179 bp, Homo sapiens
ctatcaggttccctagtgtgaaatctttctacatatcatgctttctcttttttttttttttttttttttttgagatggagtctcactctrtcgcccaggctggagtgcagtggtgccatcccagctcactgcaagctccgcctcccaggttcatgccattctcctgcctcagcctcccg

SEQ ID NO: 621 - DNA, 179 bp, Homo sapiens
gaggtctctctatgttgctcaggctggtctaaaactcctgagctgaagtgatcctcttgccttggcctcccaaagttctgggattacagrcgtgagccaccatgcctggccttttcttcattttcatgtgaagttaaacatctattcatcatataacctaacaattctttcccctgttt

SEQ ID NO: 622 - DNA, 179 bp, Homo sapiens
tctctctatgttgctcaggctggtctaaaactcctgagctgaagtgatcctcttgccttggcctcccaaagttctgggattacaggcgtragccaccatgcctggccttttcttcattttcatgtgaagttaaacatctattcatcatataacctaacaattctttcccctgttttacg

SEQ ID NO: 623 - DNA, 179 bp, Homo sapiens
gaaggaagggaagggaagaggaggggaggggagaagaaagagagaaagaaagagagggagggagggagggagggagggaggaaggaaggragggagggagggagggagggaggaagacagaaagaaaaagagaaagaaggaaagaaagaaagaaaagaagaaagaaaaaagaaaagaaa

SEQ ID NO: 624 - DNA, 179 bp, Homo sapiens
gccaagggtgatggcaggcacctgtagtcccagctactcgggaggctgaggcgggagaatggcgtgaagccgggaggcggagcttgcagygagtggagatggccccactgcactccagcctgggagacagagcaagactctttgtcttaaaaaaaaaaaaaaaaaaagtttattctttg

SEQ ID NO: 625 - DNA, 179 bp, Homo sapiens
tcatgaggttaggagagcaagatcatcctggccaacacggtgaaaccccatctctatgaaaaatacaaaaattagctgggtgtggtagcrcgtgtttaatcccagctactggggaagctgaggcaggagaatggcttgaacccaggaggccaagattgcagtgagccaagattgcgcca

SEQ ID NO: 626 - DNA, 179 bp, Homo sapiens
aaaaatagaacactgcaaaaggcatgcattgtatataccaaaaggtcagcatgaagcattatctgtatggcaagcctgcccatccactcsctcctacacgttgcatattcacacagttttgcagcttgtataaacccctattgtgatagaaactcatgaaagagtgtggtctctgcgaa

SEQ ID NO: 627 - DNA, 179 bp, Homo sapiens
gtctctactaaaaatacaaaaaattagccgggcgcggtggcgggcgcctgtagtcccagctactcgggaggctgaggcaggagaatggcrtgaacccaggaagcggagcttgcagtgagccgagattgcgccattgcagtccgcagtccggcctgggcaacagagcgagactccgtctc

SEQ ID NO: 628 - DNA, 179 bp, Homo sapiens
ttttatcagaaacttgcgtgaacaagttaagaggactctcaacttaaaaatgacaccaattgcaatgatcttgttaacatttgtgatgamaataatagcaaagtgacttagacaaattacaatagcccataaaaataagataaagtttaacacaaagtaagatgatgttaaaagacttg

SEQ ID NO: 629 - DNA, 179 bp, Homo sapiens
ttttgcctggctatttgccacagcctcctaactgacctcacttcctgccttcaatatgatcaccaatccatttttctcttaaaaaaaacktgattataccaagactaccctgtcatttccttgcttaaaactatcaattgtatgtgattgccctgagaataatattccaagttcttgag

SEQ ID NO: 630 - DNA, 179 bp, Homo sapiens
cctaacacatagatgctcagaggcaacctgttgtagtgcaagaggattgtgccaagattagaaaacaaatatttgcaacttttgtaactktcttctctaaaacttgaatgtggtgattctaaagtaaagaccgacacaaaattctttttctttagcagtcaggaaaaggcatgcatgaa

SEQ ID NO: 631 - DNA, 179 bp, Homo sapiens
aggattgtgccaagattagaaaacaaatatttgcaacttttgtaactgtcttctctaaaacttgaatgtggtgattctaaagtaaagacygacacaaaattctttttctttagcagtcaggaaaaggcatgcatgaagtaatcagatcaggtgtggtttcagcataatggcctaatgct

SEQ ID NO: 632 - DNA, 179 bp, Homo sapiens
acaagacagaattgagagccaatcaaaaggggaaaccccttataaaagcatcagatttcgtgggacttatcactaccacaagaacagtaygggggaaccgccaccatgattcaattatctcccacaaaatgggaaaattatgggaactacaattcaagatgagatttgggtggggacac

SEQ ID NO: 633 - DNA, 179 bp, Homo sapiens
ccatagtttgctgagaatgatggtttccagcttcatccatgtccctacaaaggacatgaactcatccttttttatggctgcatagtattycatggtatatatgtgccacattttcttaatccagtctatcattgatggacatttgggttggttccaagtctttgctattgtgaatagtg

SEQ ID NO: 634 - DNA, 179 bp, Homo sapiens
ggaacctctagatcccttttcttaacttggactgcaacaacaaaatatcagagactagatgacttaaacaacagacacctattttcttayagtcctagaggctgagaagttcgagatcagagcaccagcatggtcgggttcgtggtgaaggctttcctctcagcccaccatatggctgg

SEQ ID NO: 635 - DNA, 179 bp, Homo sapiens
tcaagtcgtttatcaattcccactatatctgtcttcaaagtgcttttttgcccgttatttcccccagggtcctggctctcagacaagaaragaggatagcactggaacctctagatcccttttcttaacttggactgcaacaacaaaatatcagagactagatgacttaaacaacagac

SEQ ID NO: 636 - DNA, 179 bp, Homo sapiens
agaaacctgaggggttggaaagtatcctatcttggtccattgcaatgttctctttttattttcaatatccactgagtttggaaaaacgtrcccctttgtaaatttctaggttgacatataaaatgccttcttcaccacagtttaaatagctgcacagaaagaaatttccagaatattat

SEQ ID NO: 637 - DNA, 179 bp, Homo sapiens
gaagagctggtttgattcccagctcaaatactctagtcatgagacctccacacagaactgaagctccaaaggaaaaggaacttttatctkttttgcagtgttctttatcttgattagagtgatgattacccagttgtagacatttgtcaggatccatcaagctctatccttgaaatctg

SEQ ID NO: 638 - DNA, 179 bp, Homo sapiens
cccctatcccccttctatagggggatatatagattagtatatagtttatatagtatatagattattacttttattttcgttttatagttragaaagattattactttcattttcattttatagttgaaaaagtgagcacttactatgtgtcaggttctattctagtccattgccatcta

SEQ ID NO: 639 - DNA, 179 bp, Homo sapiens
taggaaaacaagagcataattaggaaatcctttgttccagggcatgatgagatgaacttgccttataaagtcatttatcacaaccctaarttgcataaatgtaatgataaaaggtccattaccaaatttgcacttggaaatcatttcaagataccctccctttgtggagcggggaataa

SEQ ID NO: 640 - DNA, 179 bp, Homo sapiens
atatttacaattcataatcatcttttgttttacttagagatgaggtctcactatgttgtacaggcttgactcaaacttctggcctcaagygatcctcccacctcagctgcccaagtagatgggactacaggcatgcaccaccacacccagccacaagaattttgtcaataatacctctc

SEQ ID NO: 641 - DNA, 179 bp, Homo sapiens
tgcagccagagtgacagagtaagactccatctcaaaaaaaagaaaagtaagcaatttagatgctcactaaggtgtcattttaatataaawgagtataatgagtcatagcatgcacaagttagaagacaaagaaaattgtgaaaaatatgctcaagaaaatatactacagaaaataacct

SEQ ID NO: 642 - DNA, 179 bp, Homo sapiens
aatctgacattcagctgtgtcacgtagtggcatccaacatcctctccttcattgaaccttactgaagaacctaacgcctgctccactgayggtgacaccaacccaaaagctgtgccatgcatgctgaatcctgaagatctcaaaaccattacactttgggattccaaagcagaactgga

SEQ ID NO: 643 - DNA, 179 bp, Homo sapiens
tatacctaatgtaaatgacgagttaatgggtgcagcacaccaatatgacacatgaatacatatgtaacaaacctgcacattgtgcacatrtaccctagaacttaaagtataataataaaataataataataataataaaaagaatgatacaatggactttggggaattgggggaaagtg

SEQ ID NO: 644 - DNA, 179 bp, Homo sapiens
ctcactcctgcaagaatggccataatcaaaaaatcaaaaaataagagatgttggcgtggcagtggtagaaagggaacacctttacactgktggtgggaatgtaaactagtacaaccactatggaaaatagtgtggagattccttaaagaactaaaagtagatctaccatttgatccagc

SEQ ID NO: 645 - DNA, 179 bp, Homo sapiens
acaacaacaaaaacaaaaacaactacttttgctcatatgctctttggttagcttccaaatatctcccaatagaatctatagatgttattktatttgtcctgttggcagacatgagaaaaactccccacataactctctgaaacagcagcacacgcccccttgcaacacactccccacca

SEQ ID NO: 646 - DNA, 179 bp, Homo sapiens
caaagcaatgtattgtaattacaacttcaatattttaacaaagacatttactgttatgttataactggttgtagacaatcacctctgacygcactaagctcaaaagtaccatatatcatagacaacaaatatagccatttaaaattaatttaattaaattcttcacatgtagaagaatg

SEQ ID NO: 647 - DNA, 179 bp, Homo sapiens
cataaaatggagaaagaacaccctattcaacaaatgatgctaggataattgacaagtgtacactgcttgagtgagggggtgcagaaatcrccactaaagaacttattcatgtaaccaaataccacatgttccccaaaaatctattgaaatttaattaaaaaaatgctacctgaagcaac

SEQ ID NO: 648 - DNA, 179 bp, Homo sapiens
acaaaacactgctgaaagaaatcatagatgaaacaaatggaaacacatcccatgctcatggatgggcagaatcaatactgtgaaaatgaycacactgccaaaagcaatctacaaattcaatgcaattcccgtcaaaataccaccattatttttcacagaattagaaaacacaattctaa

SEQ ID NO: 649 - DNA, 179 bp, Homo sapiens
cttagaaattgctacacatgggcattcaaattggtaataaggaagtcaaactgttgctgtttgctgatgacatgatcatatacctagaamactggaaagactcatccaaaaagctcctagaactggtaaataaattcagcaaagtttcaggatacaaaattaacatacacaaatcagta

SEQ ID NO: 650 - DNA, 179 bp, Homo sapiens
ctagtgactaggaaaatgtaaatcaataaaataccatttctcatacactaggatggctataattaaaaaaacacataataactagtattsatggggacatggaaaacatgctagtaggaatgtaaaatggtgcagtcactttggaaaacagcctggcagttcctcaaaagattaaacat

SEQ ID NO: 651 - DNA, 179 bp, Homo sapiens
atggtaaatgtaacactcttaagcatctagatattgttttcttcctttacaaaaacaacttgaatatcaatttcatgactttcaggcctrtttattcgctttgctggagaacgtctaatagtagcttcactccagtgctggttcactcctgcttgtaaggcaggactccaggagtctcc

SEQ ID NO: 652 - DNA, 179 bp, Homo sapiens
tacccaagagaaatgaaaacaagtgtgtattttaaaacatagatacaaatgttcaaagcagcattatttgttataacccaaaagtggaartaaccaaatgtccattaactgatgaacagatagcattgctaaaaaggaatattattcaccaataaaccttggaaacattaggctaagtg

SEQ ID NO: 653 - DNA, 179 bp, Homo sapiens
acgcccatcacctctgaagctctttgtgtcctttctaaatcagtgagctgtccccctttccagcctgttcccaggcaaacattgaccttyactctgtcactttagattagtttcttataaatgtaatcatacagtatgtactgttcagaatctggttacttttactcagcgtaatactt

SEQ ID NO: 654 - DNA, 179 bp, Homo sapiens
tactatgtaaccaccactacagtcaagatatactatacgcccatcacctctgaagctctttgtgtcctttctaaatcagtgagctgtccycctttccagcctgttcccaggcaaacattgaccttcactctgtcactttagattagtttcttataaatgtaatcatacagtatgtactg

SEQ ID NO: 655 - DNA, 179 bp, Homo sapiens
caagaatgatgatgcccagctaactggaggatgcttttgtttcaaaccagaaacaagtggtaataggatatatgagattaaggatccaasttagtgaatgaacacaattaccttcctgccataattacatatttttgtatcctgtttcttgcagtaagcaagcacctaaagcacccctg

SEQ ID NO: 656 - DNA, 179 bp, Homo sapiens
agagtacaagaaacaaggaggaggaattacatttttaaatgcattaccaattaaaagaaaaaaaaatcagtgtaaaaataaaggctttgmctctaactagttttgtgactttgggcagccattccacttccttggcctcagatattgggcacagtaacttccaggtatttactgctcta

SEQ ID NO: 657 - DNA, 179 bp, Homo sapiens
ttcagatgagggggtgatgaaagtcaaggcagagacatgtgaaccggaaagatgagcataagaaaggcagaagcccatctagggagacayagggacaggacagagaaggacagagtacaagaaacaaggaggaggaattacatttttaaatgcattaccaattaaaagaaaaaaaaatc

SEQ ID NO: 658 - DNA, 179 bp, Homo sapiens
gagacattaactatggattagaaaaaccttcttaaagcagacagattctcagaaagtgttgaaagagactggtcgtcacaaaggttgagktaaacatgatttaggtgagtatatttcattatgtacattaatgtaagttgttgtaagacctcaagtaagacatataagaaataaaaaca

SEQ ID NO: 659 - DNA, 179 bp, Homo sapiens
taatctcagcactttggaaggctgaggtgggcggatgacttgaagccaggagtttgagaccagtctggccaacacaatgaaaccccgtcyctactaaaaatagaaaaaattagctggacatggtcacatgcctataatctcagttacttgggaggctaagccatgagaatcacttgaat

SEQ ID NO: 660 - DNA, 179 bp, Homo sapiens
acttgttaaatgagattttgtgttttactggaaaattctttttcataaaattattgactgaagattagtccttgataagcaaatcaattktgtaattcaaacatggctatagaaattcaatgcatttttcttttttaaaattgtattttattttgagaaagcatctcactctgtcaccc

SEQ ID NO: 661 - DNA, 179 bp, Homo sapiens
tgtattctaattagggtctggcttctaatgtattataaaagtaacttgttaaatgagattttgtgttttactggaaaattctttttcatraaattattgactgaagattagtccttgataagcaaatcaattttgtaattcaaacatggctatagaaattcaatgcatttttctttttt

SEQ ID NO: 662 - DNA, 179 bp, Homo sapiens
gttacatagaggaaaaactcatgatgaatagtaatttgaacaaggctatatgtagcactgcattcactagtgtaagaatcttggatctcrtctaccagtgttcagaagagtatcgagagagtatagacagtagctagaaaaggcacttactaaacttctttacatgccctttctgttgt

SEQ ID NO: 663 - DNA, 179 bp, Homo sapiens
ataagccatcgcgcccagcccatatgtcttcctttttcctaggtctgctcctcacagcagcagcttaaatctttccttctatttctctcyaacctcacaggcccttgctaattttgctcctcacttgtagcatcttttttttatttttgtcatgaaaagaaatttagactttcaggctt

SEQ ID NO: 664 - DNA, 179 bp, Homo sapiens
tctaatgtaaactatggattttagtgataatatattaatattggcttatcaactgaaacaaatgtacaactaatacaatgtctcaggaayagggaaaactgagatgagagggtaatataggaaatctctttactttcaactcatttttctacaaacctaaaactgatataaaaagaagt

SEQ ID NO: 665 - DNA, 179 bp, Homo sapiens
aatgatgttgaagaaatttccatattaatgattcataattacttgtcatgttccatactcactcatattgaaccccaaagttatgttatsatgtgctagtctttctaaatcatttgctaaacaaatcaaggaatcagagagtatggcatgtatgacaacacctcatgtcattatagata

SEQ ID NO: 666 - DNA, 179 bp, Homo sapiens
ataattcctgctagagtaggagctataaaatatgctgccccttaaatgatgttgaagaaatttccatattaatgattcataattacttgwcatgttccatactcactcatattgaaccccaaagttatgttatcatgtgctagtctttctaaatcatttgctaaacaaatcaaggaatc

SEQ ID NO: 667 - DNA, 179 bp, Homo sapiens
gacacagagccaaaccatatcaaaaatgcaaattaaaaccacagtgaaataccactacacatccacgagaatggccaaaatgaaaaatayttacaatgccaaatgctggtaagaatgtggagcaactgaaactttcgtgcactgttgctgaaagtgtaaaatggtacaaatacctggaa

SEQ ID NO: 668 - DNA, 179 bp, Homo sapiens
aaaaaaaaaaaacttttagaagaaaatatataagaaaatattcaggactttggggtagacaaagacgttttagcaaaaatgcaaaaggcrtacaccatcaatgaaaattggtaagttggacaaaatttgaaacataagctctctggaagacattattaagaaaacgaaatggcaagcca

SEQ ID NO: 669 - DNA, 179 bp, Homo sapiens
ttttaataaagtcagcaaggtagctcaatgggaaagaaaattctttttaacaaatggtgctaaattaactgcatatgcccatggaaaaayatgaaccttacaccatgaataataattaccttgaaatagactgtaaacttaaacgtaaaagccaaaactaaaaaaaaaaaaaaactttt

SEQ ID NO: 670 - DNA, 179 bp, Homo sapiens
aacggggagatgtaccatgtgtcttggttggaagactccatgttattaagatgcccattctccataaattgatctacagattcaacacamttgcagttaagaattccatagatctttttttttagaaactgacaaggtgattctctctctctctttctcacacacacacacacacacac

SEQ ID NO: 671 - DNA, 179 bp, Homo sapiens
caaaccaagtgaaaatatctcgtatcagatatgaaagttattatgtataatacatcttaagaaattctggctcaaacatataaggaagargttgaagttcttagaatgaaaatcttaattctcaatgtaaactttgagcaaatacattaatagagattgtgaactttctgcaactggta

SEQ ID NO: 672 - DNA, 179 bp, Homo sapiens
ctattttgttttatttttcttattaatataagaaggcaggaatgtcaggcctctgagcccaagctaagccatcgcatcccctgtgacttkcacgtatatgcccagatggcctgaagtaactgaagaatcacaaaagaagtaaaaaggccctgccccgccttaactgatgacattccacc

SEQ ID NO: 673 - DNA, 179 bp, Homo sapiens
taccacaaaatcttccttcagcttaatctctcccactttaggttcccacgctgcccctaatcccgcttgaagcagccctgagaaacatcrcccattctctctccataccaccccccaaaaattttcgccaccccaagacttcaacactattttgttttatttttcttattaatataaga

SEQ ID NO: 674 - DNA, 179 bp, Homo sapiens
tccgttctcaactactcatgcatgccctgctcttgtttacactgccagtttacactgtttctccaagccattacagctgatatctcctcrtgctatccccaaactgccactcttaactcctgaagtaaataaataatctttgctggcaggactatgctgaatctccttaggcactctaa

SEQ ID NO: 675 - DNA, 179 bp, Homo sapiens
aattttctatatgaatatgattaataacaagttttccattacaatcatgggactttttgcctcacacaaatgaaaacagatgtagagccmaagaaatgtgaatattttaacaaagttttttttttttaatcaagtatgtaattactggcccatgcaaaagtgggaataagatggttctc

SEQ ID NO: 676 - DNA, 179 bp, Homo sapiens
ctgtttctattccggccaataaatcctggcagttggtcaattgttatcctgttaaaaggtctggagtggaagaatggactgtgtttttcrtaaaaagcttgctgacaagaccagagagagtttccactggcaattctatttcacagtcctttcccttctttgggcaacacaaatgatgg

SEQ ID NO: 677 - DNA, 179 bp, Homo sapiens
taattgaatttgagttttataaaatttgctctgtcggcaggaagtaagaagtctcagtttagggagggaggggcagaattaggagaaaarctctcaggaaagaaattctattcataagcatggaatgttttccattcattttgtcatctctgatttttttcaataattttttctttttt

SEQ ID NO: 678 - DNA, 179 bp, Homo sapiens
ctcctttgaaacaagctttctcctctggggaacaactgaagacaccatttcttccactggatggtgacacctggagcaatacagccgacwtcctaccagattctccatccaactgaggatgaggcagacatctggagaaagagggggctgtgggaggttgagcccagctcaactaggat

SEQ ID NO: 679 - DNA, 179 bp, Homo sapiens
ctggggaacaactgaagacaccatttcttccactggatggtgacacctggagcaatacagccgacttcctaccagattctccatccaacwgaggatgaggcagacatctggagaaagagggggctgtgggaggttgagcccagctcaactaggatttattggccttcctataaattcca

SEQ ID NO: 680 - DNA, 179 bp, Homo sapiens
gtagcagaagaaacttgagaggcttgggtgtctcctcacagggagcaatggataaaggaagcatgtattaaagagtgtgaaatgtatccyaaagcaaatttccattaccgattttctgttaactgattcagatcactagaaacatctaatttattttttagacagttccaaaagataag

SEQ ID NO: 681 - DNA, 179 bp, Homo sapiens
ctatattacgcaagcacacaccttaaatattttattattgaaaaattcctttcaaataagtgtgatatctcactggatgagtccaggacratgtataaagaaatgtgggtttatagcctggattcaacatttaataatcatggaaacttcgtcaaatctgtgaacttccctgagcctca

SEQ ID NO: 682 - DNA, 179 bp, Homo sapiens
gcattgaccctctaagtaggctaaaatttattgagtatcttttctgaaaattacagagataaacattgtctcaagcattttcttttattmttacgtttctgctatttgtcattgaagaacccaacgataagagaggttgactaacaaccaaatttatacctgagttttagatcagaaat

SEQ ID NO: 683 - DNA, 179 bp, Homo sapiens
aaaatttattgagtatcttttctgaaaattacagagataaacattgtctcaagcattttcttttattattacgtttctgctatttgtcawtgaagaacccaacgataagagaggttgactaacaaccaaatttatacctgagttttagatcagaaattaaaacctgggaggccgaggcg

SEQ ID NO: 684 - DNA, 179 bp, Homo sapiens
agtgaaaatgtaattgtaactctgattcactgctgatgggggtgtaaattaatataatcactttataatacggcagtaactagtattatygaatgtgtatttaccctttaatgcttcaaatattttcttagatataaacccaacagaaatgtgtatacatctaaaccaagacacatatt

SEQ ID NO: 685 - DNA, 179 bp, Homo sapiens
cttggatgaatctcacagtcatgtttaccaaaatgaactagacacaatagagagtaatgtataattctctttacaaaaaatttaaaacasgcaaatctaatgcatgatgttaaaggttaggatagtagttactttgtgggaggaggatataggtggtgacagagataggcttctgaggt

SEQ ID NO: 686 - DNA, 179 bp, Homo sapiens
acacaaatatatcctcctaaaccttccagtaagcaagctgtggcatccagatgatctcctgggtcatgggggataaggctaatctcctargtgtctggcagacaggacaggcaaattcccagaatgccaaaatataccatctgctgctgtttggcattgcccttaagtccagagtgtgg

SEQ ID NO: 687 - DNA, 179 bp, Homo sapiens
catcaccatcatcaaagaccaaaagtagataaaaccacaaagatggggaaaaacagagcagaaaaactggaaactctaaaaagcagagcrcctcaccccctccaaaggaacgcagttcctcaccagcaatggaacaaagctggatggagaatgactttgacgagctgagagaagaaggc

SEQ ID NO: 688 - DNA, 179 bp, Homo sapiens
taatacaactccaagaaccataccggagaaccaaacagagtggttctggccagggctcactctttctctgtttctctctcctgtcatctmtatttcaacaatatctcttagctttgcttctctttgggtgcagcattattctcttctactgcaaataagaagattcctccaggtgtcca

SEQ ID NO: 689 - DNA, 179 bp, Homo sapiens
tcctttggttcaggtgctgccaggaaaacaatttaatatgaaaagaccctccttcatatgtctgaaaaacaagcacaagaaagaagcccraaaaaaaaatcagattacattaaaaatcattaggaagtaactctaatttgggggggggttcaaaccaggtttcttttacatagaattta

SEQ ID NO: 690 - DNA, 179 bp, Homo sapiens
cctaaagccctttatgaacatgcaaactcctcccttctgaaaacctttgcgtgagtggtcagcaggctaattcatccattgcaatgtggytttgtgttagggttctgtttccgtgctgcctgcaagataatcacagatgtgactgcatcttagaagttcctgaatctttcaagacagtc

SEQ ID NO: 691 - DNA, 179 bp, Homo sapiens
aagcaagacaaaggtctttgtcttcatggaagctcagtgaagcccctacaaaggcaactccaagatgaaattaatattttgctctttttmtgttgagaaaataactttttgtaaaataaaaattattgacaatcaattgtacagtttaatacagtggctttaaaactgtaccttattga

SEQ ID NO: 692 - DNA, 179 bp, Homo sapiens
gcaaaccgaatccagcagcacatcaaaaagcttatccaccatgatcaagtgggcttcatccctgggatacaaggctggttcaatatacgyaaatcaatcaatgtaatccagcatataaacagaaccaaagacaaacaccacatgattatctcaatagatgcagaaaaggcctttgacaa

SEQ ID NO: 693 - DNA, 179 bp, Homo sapiens
tatcagtcagtcatttgacacctctcatttcttgtgttatatcattttttcaacaacatgacttgcaatacacacatggtgaaattggaraggattttacaaaatgataatataataactctatttttgccccaaacatttagctatttgtgctctactccttcagaaaatactttgct

SEQ ID NO: 694 - DNA, 179 bp, Homo sapiens
agaagagcaactccaagacacataattgtcagattcaccaaagttgaaatgaaggaaaaaatgctaagggcagccagagagaggtcaggytacccacaaagggaagcccatcagactaacagcggatctctcggcagaaaccctacaggccagaagagagtgggggccaatattccata

SEQ ID NO: 695 - DNA, 179 bp, Homo sapiens
ctggaaagcgttctagtcccactggacaccaaggaggaagaagggacggaaaatattaggcccataggtttatcttcctcagtagtccaygagatttgagcttatatgtagggagcaaaattgtttgtctaaaagcagttaataaatgccccaaaaaggctgggcgcagtgactcactc

SEQ ID NO: 696 - DNA, 179 bp, Homo sapiens
tttctttcaaggtcagcatgatgagaatattccgaatgctttgaaggattctactcttcctcctctttttttaaagaaaatgcaaacatrtactaaagttgcttttgaaataagacatttatccatttagtaattgcttaactagagaagaattacttcattcagacactcaagaatgt

SEQ ID NO: 697 - DNA, 179 bp, Homo sapiens
aaatgctaagggcagccagagagaggtcaggttacccacaaagggaagcccatcagactaacagcggatctctcggcagaaaccctacargccagaagagagtgggggccaatattccatattcttaaagaaaagaattttcaacccagaatttcatatccagccaaactaagcttcat

SEQ ID NO: 698 - DNA, 179 bp, Homo sapiens
ttgttttagcaactaataatctgctgtgcacatttcagttggtatttggaaaacatttaactctgtagctttgtagaaatgatattcccrcttgaacatagaggaaattgtacttattgagagtttaactcaagagttagtgcacaacaaaagttcattagtgcccatttcatgttctg

SEQ ID NO: 699 - DNA, 179 bp, Homo sapiens
gtaaatgaagagaggtttttgatcagagaaggtgttgtttgaaacagccagaagatccagcttgcaacaattacggacaagctactgtgwcttaatatcaagctaaaaattccctggtccactgatgcaagacttattttactcaaattgtgaacaaaaagacaagtggtaaattagga

SEQ ID NO: 700 - DNA, 179 bp, Homo sapiens
ggacaacttggtgggtggggggacgccagtgacctggagtgttgattggtcaggtcagaaatgaaatcacagggagtggaagctgtcttsttgtgttgagtcagttcctgggtgggggccacaagatcagatgagccaatctatcaatctgggtggtgccagctgatccatcaagtgca

SEQ ID NO: 701 - DNA, 179 bp, Homo sapiens
tgccagaagtttcaataaaagatcactactgggcacccttataactgtgggaccattaggagatttaaatgtcttcttcactttgcccayggtagggagtgaggctgcactgagaaacatcactggcatgaggtctaattgcctgccctatgattaatgttgccaagtgaattcagaag

SEQ ID NO: 702 - DNA, 179 bp, Homo sapiens
attctaatccccccaccaacttttcaaatttctcagtggaaagtggaaaatctctgatccacaccatctgtttacctcatccagtagtgyattccactctctgcaacagaaggcttgtgacaacctgccaataaaattcctgaggttgtcaaggcacaggatacttgtgaaaaagattc

SEQ ID NO: 703 - DNA, 179 bp, Homo sapiens
atcaagaagtcccaagcctgtatttttccagatataatcatttaaacaatcctaacctttgtgaggaaagtataggaggccaggcaaggyagacagagcttgaggccttggcagttgcttccttttgatctctaggggaagggggtgggggttaatatgtattcattaattaataccaa

SEQ ID NO: 704 - DNA, 179 bp, Homo sapiens
cagggagtatcacctcacgtggccacagaaggagccaaagaaaggtgagggggaggtgccacacacttttgaaggacgagatctaatgakaactcactcactatacagtaccaactgcggggtcggggggcaggggtggcagtgggggtggttgctaaaccattcctaagaactctgcc

SEQ ID NO: 705 - DNA, 179 bp, Homo sapiens
aaaaattacaaatggatgaataaatgaatcctctcctttcaagttctgtgctccatacaacaaatctagatgggtctcatttagatgggwtttagagacacctttcttaaatacctatcattttacgaatgaagctgttgtctaaagagtcctcttggccacttcctgaaaacaaatca

SEQ ID NO: 706 - DNA, 179 bp, Homo sapiens
actctcaaatgtcctaataatcccatggaaaatgtaaatgtaatgaggaccaagaattataaggtaagaagtgctaatgtcagatttttrcccactacataagcccactcttgtactagggcagtgactttcttctttgggtgagaccttgaaatctgggattataattttgaattata

SEQ ID NO: 707 - DNA, 179 bp, Homo sapiens
ccctttatgaacatgcaaactcctcccttctgaaaacctttgcgtgagtggtcagcaggctaattcatccattgcaatgtggctttgtgytagggttctgtttccgtgctgcctgcaagataatcacagatgtgactgcatcttagaagttcctgaatctttcaagacagtctggttca

SEQ ID NO: 708 - DNA, 179 bp, Homo sapiens
tcccttctgaaaacctttgcgtgagtggtcagcaggctaattcatccattgcaatgtggctttgtgttagggttctgtttccgtgctgcytgcaagataatcacagatgtgactgcatcttagaagttcctgaatctttcaagacagtctggttcacaagaaaattaaaaggtggaggt

SEQ ID NO: 709 - DNA, 179 bp, Homo sapiens
cggatcacctgaggttgggagttcgaaaccagcctgaccaacatggggaaaccccgtctctgctaaaaatacaaaattagccaggcgtgktggtgcatgcctgtaatcccagctactcgggaggctgaggcaggagaatcgcttgaacccgggaggcagaggttgcgatgagccgagat

SEQ ID NO: 710 - DNA, 179 bp, Homo sapiens
acaaatgtttcttctaacaaccccacaatatcaccccttaccacaaaatcttccttcagcttaatctctcccactttaggttcccacgcygcccctaatcccgcttgaagcagccctgagaaacatcgcccattctctctccataccaccccccaaaaattttcgccaccccaagactt

SEQ ID NO: 711 - DNA, 179 bp, Homo sapiens
cccgtcccaccattgctaccgggtcggccccgcagggtctgagacccgcacccttccccggtcccacccgtcaccaggccgcccgcgtakccaggaattcttagccaggttcctgtgcgcccaccgtgaccctaagagaagaggcggacgccctggcacgtccttccctcctgcttccc

SEQ ID NO: 712 - DNA, 179 bp, Homo sapiens
aaagtagtttttgacaggggtgtttctagggtgggccctgataaattaagaggatcggaaagcaaagatgtctgtgccttctgtttcaaratagggcacatggaggcagtgacaccctggagcttctctgcaccatgacagagcacaggactcattctgttctctacatcgcactcaac

SEQ ID NO: 713 - DNA, 179 bp, Homo sapiens
gtcatactttggataacatttatggagcttccatacttctaaaaggtggtcataattttgttttgcttgaatgggagaaaacataatcgytgtatatttaaatattttacatctctcaactagatgaaaagtaataatttgttttaccacttgaccataatttttctgaaaattgctaa

SEQ ID NO: 714 - DNA, 179 bp, Homo sapiens
tacaaaacaaaaataagtttaagataacatctataagtataaatgctatataaatactagaaaatatttaatgtgtgtgtgtgtgtgtgwgagagagagagagagagagagagagagagagagagagagagacagagagaggagattgcttactatttggtataacttgcaaaaaaaaa

SEQ ID NO: 715 - DNA, 179 bp, Homo sapiens
cacttatgtgtatgttcaccacatgaacctacatccacacacacacacacacacacacacacacatagaaacacacacacccacagagtstttaaagacggactttattttatgctgtaaacctagactttgggaggctgaagtggagggattgcctgagtccaggagttcgaaaccag

SEQ ID NO: 716 - DNA, 179 bp, Homo sapiens
atgataagcattaatctggggcagatcagatgtagaccaggctctatgatgtgtgatgagctagggatctattgatttccatgattttayggttcttagagttgaagaaatattcagaattggaaaggaaaatccctgaagtctgcaatgaagtctgcagggcatgggactctccaaaa

SEQ ID NO: 717 - DNA, 179 bp, Homo sapiens
tggctcaagcctgtaatcccagcactttgggaggccgaggtgggcggatcacgaggtcaggagatcgagaccttcctggccaaaaccgtraaaccccgtctgtactaaaaatacaaaaagaaattagccgggcgtggtggcaggcgcctgtagtcccagctactcggaaggctgaggca

SEQ ID NO: 718 - DNA, 179 bp, Homo sapiens
tttttagccacataaaatgtattatttaatattatttaacttcagcttgtttttttaactatatttatgtggggcattaatatttaactrtaaaacatttgtcaccaggcagctgtgattgcaagtagaggagtaatttcaaacaagaatgcttaaaagttagctatgccttgataaaa

SEQ ID NO: 719 - DNA, 179 bp, Homo sapiens
atacaggcatttcaggggtacataataaatgtcaatcctcatagccagttctgagagatctcctggtgtcactttaatttgtagcaacaygcccaagaccacatatcaagtgagaaatataatagaataataagtctaaagttgccatcattgaggtttctattcagctatttatctct

SEQ ID NO: 720 - DNA, 179 bp, Homo sapiens
gagagagagagaaagaaagaaagaaagaaagaaagaaagaaagaaagaaagaaagaaagaaagaaagaaagagaaagaaagaaagaaggragggagggagggagaggagagaaagaaaaaggaaggaaggaaggaagagagagagagagagagaaagacctagtcaccaaaagcaagag

SEQ ID NO: 721 - DNA, 179 bp, Homo sapiens
caccaatccatttttctcttaaaaaaaacgtgattataccaagactaccctgtcatttccttgcttaaaactatcaattgtatgtgattkccctgagaataatattccaagttcttgagcagcatatgcaaggccttcgccatcaacccgttgtcatcgttagcaactcttctgtagct

SEQ ID NO: 722 - DNA, 179 bp, Homo sapiens
gcatatatgtgtgtatatgtgcatatatatgcatatatgtgtgtatatgtgcatatatatgtatatatgtgtgtatatgtgcatatataygtatatacacacatatgtatatatgtgtatatatgcatatatatgcatatatatgcatatatgtgtatatatatgcatatatgtgtata

SEQ ID NO: 723 - DNA, 179 bp, Homo sapiens
ggtcccattttacaaataaggtttaaagggttttagaaagtcacccattcaccatcattaataagttttggagctattgtctaatccagrggtgtctgtcctcaaagctctgttccttacattcatctatcctcctgctctgtgcggtttctgagccctaagcctttctcctcttcatg

SEQ ID NO: 724 - DNA, 179 bp, Homo sapiens
ttactcttccacaattaattctggcttcactcctcacctattgtgggactgtgaaccagtgacctagcttctccatgttgcttttcccaygtgtaaaattgagatattaatagtacatatgacataaagttgttataagttgttataaatgaggtaaagattaaataaaatactaattg

SEQ ID NO: 725 - DNA, 179 bp, Homo sapiens
ctcactcataggtgggaattgaacaatgagaacacttggactcaggaaggggaacatcacacaccggggcctgtcgtggggtggtgggakgggggagggagagcgttaggaggtatacctaatgtaaatgacgagttaatgggtgcagcacaccaatatgacacatgaatacatatgta

SEQ ID NO: 726 - DNA, 179 bp, Homo sapiens
tcctaaaagcaagcagccctgtaaaagctgctctgtccaatatggtaatcactagccatttgtgtttccatttaaatttcaagtaattamtatcaagtaaaatttaaaattcagttccttagtcacactagccacgttgtgagtgtgcaacaggtaaagctagtggcacagacatagaa

SEQ ID NO: 727 - DNA, 179 bp, Homo sapiens
agtctatgtgttgtcctttgtgtctctcaactggcaccagcttcagctaattgaatcagaagtttaagcttatccaagctgggctatttraagtctttttgttagaggggttgaaatcccaaactgggtattttgcttgaactagggtgatgtcaattaacgagctgagactgccttta

SEQ ID NO: 728 - DNA, 179 bp, Homo sapiens
tcgcgccactgcactccagcctgggtgacagagcgagactccgtctcaaaaaaaaaaaaaaaaaaaacaaagactatttttttttttttytgaggaaaagaaatcctatgtggggttatcctaagcaacaatcttatttgactaggcacacacaaacacaaaaaactgtgaccatcagt

SEQ ID NO: 729 - DNA, 179 bp, Homo sapiens
attctacagttttaagtaatttaaacctatcagtcagtcatttgacacctctcatttcttgtgttatatcattttttcaacaacatgacwtgcaatacacacatggtgaaattggagaggattttacaaaatgataatataataactctatttttgccccaaacatttagctatttgtg

SEQ ID NO: 730 - DNA, 179 bp, Homo sapiens
aagtaacaagcagaattttacgtatattcactattatgaagtgggggggactccctctgtctatctggcacataattgttatcatttccmaaaagtgaaatggtaacataaagatgttatagaaaatagtgcatatttcagtaaaatgtttctttcaaggtcagcatgatgagaatatt

SEQ ID NO: 731 - DNA, 179 bp, Homo sapiens
tgcagtgttctttatcttgattagagtgatgattacccagttgtagacatttgtcaggatccatcaagctctatccttgaaatctgtgcrttttactacatgtaattatggcttaaaaatatagtaaaaaaattttcaaactcctgttctcccaaccatactttctcttcatttatcaa

SEQ ID NO: 732 - DNA, 179 bp, Homo sapiens
acatggaagtttaatatctccttataatttggggtagtattaaggggctaaaggcatttttattctttatcatttcattataatcaaaawggatttttaattacttacttgttaataataaaatctatgtttccctaatatgctatttaaaagctcactagtatgctataaaatggtgc

SEQ ID NO: 733 - DNA, 179 bp, Homo sapiens
caagggaaaatggcaaatagaagattgtaaaacaattttcctggaagaactttggcaatgataagcattaatctggggcagatcagatgyagaccaggctctatgatgtgtgatgagctagggatctattgatttccatgattttacggttcttagagttgaagaaatattcagaattg

SEQ ID NO: 734 - DNA, 179 bp, Homo sapiens
attagattgctaaaaaagtatcagcattgttggtattatttgtcctggaagtgattgaagggtcctaggaaaaaaaataactgtgtaaastgatttttattaaaactatttttttggccgggcacggtggctcaagcctgtaatcccagcactttgggaggccgaggtgggcggatcac

SEQ ID NO: 735 - DNA, 179 bp, Homo sapiens
gccacgcaggggatgggatgggtggagtgaggggcatgatgaaagcactggaaataaaacaccaaaaaataatttgttatcatatagaakaaccaagtgagcaatcaactgaatcattaatatacattttatttagacgaggaaaatcctatgattattacaatttttaaaattagatt

SEQ ID NO: 736 - DNA, 179 bp, Homo sapiens
caacttttcttcaccagctgcatttgctgagaatccaaaggacatttcagatgagggggtgatgaaagtcaaggcagagacatgtgaacmggaaagatgagcataagaaaggcagaagcccatctagggagacatagggacaggacagagaaggacagagtacaagaaacaaggaggag

SEQ ID NO: 737 - DNA, 179 bp, Homo sapiens
gatgatagatacatagatagatagaatagagatgataaagatagagagatgaagatagagatagagatggacatggagatggagatagakagatgaaaatatatatatagagagagagatggagatagagatatatagggacagatagacacagagatagaaatagagatagagataga

SEQ ID NO: 738 - DNA, 179 bp, Homo sapiens
tctaacaacatttgtcattttggtactttttcctatttactgatctgtatccagttatgggtatattgtccttattcttggcatgtttaytaacttttattggatgctagatatggtaaatgtaacactcttaagcatctagatattgttttcttcctttacaaaaacaacttgaatat

SEQ ID NO: 739 - DNA, 179 bp, Homo sapiens
tatgcactctgattgaagaagattttgctgccagtcctactgtaatttctcctttccccacgtcttcctcctggaggcttttacactacygagtacagcagcatggtgagttcaggatgggtctgcatttctttgtaattctttatatttctgtataaaatgggaaaggagcaagcttt

SEQ ID NO: 740 - DNA, 179 bp, Homo sapiens
atttgaataaattatgagctatcctttcaaacagctattggcaagttttaaacccaaaatatatacacatagttctgtaataaaactgtktgacttctcaagtaacatgacttccttatttctgaacagtactggttactttcaaaatgaatttttattgagattttccattaactatt

SEQ ID NO: 741 - DNA, 179 bp, Homo sapiens
ttgtaaattatatgttagattaattatagctcaataaagctgttatttaaaaaaagaaacataaatatgtctaaatatttttctgtattkattccaacttttacttattctcccaaatcatacaaactacatacatttccttctatgattttagtctggcattttttgaggcatttcac

SEQ ID NO: 742 - DNA, 179 bp, Homo sapiens
attttctacgatccctgccttcaaccaaactcagagcttggtggcaaaacagatgctgcatgcataccaacaggacatagactgactgtktgtgtgtgtgtgtgtgtgtgtgtgtgtgtgtgtgttcatgtgcaagtgtacatgtctatgttttgactgggggtgaaagggaggctatg

SEQ ID NO: 743 - DNA, 179 bp, Homo sapiens
acttatagtggaaggagaaggaggagcaggcacgtcacatggcaagaaagggagcaagagagagaatgtggaggtcccagactcttttarttaatcagatctcaagcaaactaactgagtgagaactcacgttaccaagagggtggcaggcactaagacattcatgagggatctacccg

SEQ ID NO: 744 - DNA, 179 bp, Homo sapiens
ctgtacaggaagcacagtgccagcatctactttaggcaaggacctcaggaagcttccacttatagtggaaggagaaggaggagcaggcaygtcacatggcaagaaagggagcaagagagagaatgtggaggtcccagactcttttagttaatcagatctcaagcaaactaactgagtga

SEQ ID NO: 745 - DNA, 179 bp, Homo sapiens
cacttacttcttaccatgagttccacatcaatggatgcaaacaatcatagaatgaaaatgtttggagaaaaaaacaataaaaataagaarataacaaaagcaatataataattttatttgtatttttattgttaacaaaaacaataagtttatttcattaacaaaaaaattcaaataaa

SEQ ID NO: 746 - DNA, 179 bp, Homo sapiens
tctctactaaaaatacaaaaattagccaagcatagtagcaagtgcccatgatcccagctactcagggaggctgaggcaggagaatcactygaacccgggaggcgaaggttgcagtgagccgagatcacttcactgctctccagcctgggcaatagagtgagaacctgaaaagaaagaag

SEQ ID NO: 747 - DNA, 179 bp, Homo sapiens
accaaagctaggaaaatatgcagtagtggaactttgaaccatgtcacaatattaaaacaggtcagattttagatcctttaaacaaacaawcaacaacaataaaacacagaagtctggtggtgttggatcctagaccagaagtacgggccattaggaatcagtgaattagttggattcca

SEQ ID NO: 748 - DNA, 179 bp, Homo sapiens
tagccacataaaatgtattatttaatattatttaacttcagcttgtttttttaactatatttatgtggggcattaatatttaactgtaaracatttgtcaccaggcagctgtgattgcaagtagaggagtaatttcaaacaagaatgcttaaaagttagctatgccttgataaaatagg

SEQ ID NO: 749 - DNA, 179 bp, Homo sapiens
tttagccacataaaatgtattatttaatattatttaacttcagcttgtttttttaactatatttatgtggggcattaatatttaactgtmaaacatttgtcaccaggcagctgtgattgcaagtagaggagtaatttcaaacaagaatgcttaaaagttagctatgccttgataaaata

SEQ ID NO: 750 - DNA, 179 bp, Homo sapiens
tatcagggcagctggctaggtacagagatggacgctgagaaaacacagtcaactgacaaagagggaggaacagacaaggctttgaagagkgaaaggagtcgaaaaagactttgaaaggataaatgaaaattcaccaaatacgtaaaggatacacaaagaacaccaatttaattttatca

SEQ ID NO: 751 - DNA, 179 bp, Homo sapiens
cttcacagtacataccatattgagtaattaactgttcacagtgtttagtttttcaccacttttaggatttaaactccatgaggcagagaytttaccatgagagcaattaatatttgttggatgaatggtcagaccatcctggagactatgaatgcatgaggtgccaaatttctgcagtg

SEQ ID NO: 752 - DNA, 179 bp, Homo sapiens
caccctgtcagaaagaaaagaaaaaaagaaaaggaaggaaggaaggaaagaaggaaggaaggaaggaaggaaggaaggaaggaaggaagraaggaaggaaggaaggaaggaaggaaagaaagaaagaaagaaagaaagaaagaaagaaagaaagaaagaaagaaaagaaaggaaggaag

SEQ ID NO: 753 - DNA, 179 bp, Homo sapiens
ttcctagcaataaaataaacatctacaactttttgcccaagtggggtttctgtaatttaaatagtttttgaaatgttcagaaacattgartacaccagaacacacagaggggaacaatagacaatggtacctacttgagggtagagggtgggaggagggtgaggttcaaaaaggtacca

SEQ ID NO: 754 - DNA, 179 bp, Homo sapiens
gggagagaggtggctgggaaggtttgcagacctgctttcaccatcaccatcttgccacctgtctgaggagtgaggaaaaggagaagaaargtttccagcatggcaacagtgtggccaggagtgcaattcacttgagatataggagaggaaatgaattcctgggggaaagtgagggattt

SEQ ID NO: 755 - DNA, 179 bp, Homo sapiens
tgtggtctcgtctcactgcaaccaccacctcctgggttcaagtgattctcctgcctcagcctcccaagtacctgggattacaggagcccrccaccacaccgggctaatttttgtatttttagtagacatgagtttcaccgtgttggccaggctgacctcaggtgatctgcttgccttgg

SEQ ID NO: 756 - DNA, 179 bp, Homo sapiens
tatagggttacaacactgcccttcatatactgaggtagcagcagggaaactttttaattattagaaatattgaactttgcctcccacccscaaacatttttctcattcagttcctgttcttttttatttctgtaatttttactgtttcaaaaatgatcttttttctttcggaagaagca

SEQ ID NO: 757 - DNA, 179 bp, Homo sapiens
cgcagttcctcaccagcaatggaacaaagctggatggagaatgactttgacgagctgagagaagaaggcttcagacgatcaaattactcygagctacgggaggacattcaaaccaaaggcaaagaagttgaaaactttgaaaaaagttcagaagaatatataactagaatagccaatac

SEQ ID NO: 758 - DNA, 179 bp, Homo sapiens
ttctgcaaattctactatttccaaataaagtagtgtgcagtttttcaggaccacaatgttttactatctaagtttatttctggtaacctrtttatccaagagattccaatgactgcaatactttttaaaaggtaaaaaggcataccttttagtactatgtgtaattatatgaacgtata

SEQ ID NO: 759 - DNA, 179 bp, Homo sapiens
atttttaatgtatttaagctctagtatcctcatcgctcagatggttggtttggttcgcctgagtggcttttagatctgtatttctagtgmcctctaatccatgggatgacctttaatgctgcttccaaaaaagaaaaatattagagggcaaatgaattgccaaatactcattttttaag

SEQ ID NO: 760 - DNA, 179 bp, Homo sapiens
gtgtatcattttcatcttgaaatgtttacctcatctagtatagaaaagttttcaataattattttccctggcatatgtagtgtttactcygtatgtgtatttatgtgtgtatatgtatatatgtttatgtatgtgtacttgtgtatgtagcatcatctgtatcttcagccctgatgttt

SEQ ID NO: 761 - DNA, 179 bp, Homo sapiens
ccagcaatggaacaaagctggatggagaatgactttgacgagctgagagaagaaggcttcagacgatcaaattactctgagctacgggargacattcaaaccaaaggcaaagaagttgaaaactttgaaaaaagttcagaagaatatataactagaatagccaatacacagaagtgctt

SEQ ID NO: 762 - DNA, 179 bp, Homo sapiens
agagaggtggatagggtctcagatgatgcaaaggtcaaaaagaaaaggaactctgagcaggaaatccaaattagcaagttggcaaagttygacatttggagaaaataatttcagtagactaatgaaagcagaaaccagattgctagaagaactggattgcaaatgataagcaataaggc

SEQ ID NO: 763 - DNA, 179 bp, Homo sapiens
agagaggtgggaatagagagcaatataatagccaatccctttgtactttttatggaaagtagtgaaactgaagagagacaaaagccatcytgaaagagtgaaaatgacaacaggacatccgtggctcattaggctagcacagtaggcttccccatttggagaaatgggatttgaagtcc

SEQ ID NO: 764 - DNA, 179 bp, Homo sapiens
gcaatggaacaaagctggatggagaatgactttgacgagctgagagaagaaggcttcagacgatcaaattactctgagctacgggaggamattcaaaccaaaggcaaagaagttgaaaactttgaaaaaagttcagaagaatatataactagaatagccaatacacagaagtgcttaaa

SEQ ID NO: 765 - DNA, 179 bp, Homo sapiens
ctttggatctcctgaaaacaacttgtttcattaacatgtcatgtagttttaatgtttgttccagatgctctgaaatttgtgacccttttycctttagtgaaaattaaatttttactaaattgtgggaaaatgaaagaatttcagactatttaaggatatacattttgtttgttcgtttt

SEQ ID NO: 766 - DNA, 179 bp, Homo sapiens
ccatgttggccaggctcctgacttcaagtgatccgcctgccttggcctcccaaagtgctgggatcacaggcatgagccaccggtgacacytggcccacaaatgcatttttctagtctgtggattaccttttcatttatttaatggtatccttcaaaaagcaaaagtttttgattttgtt

SEQ ID NO: 767 - DNA, 179 bp, Homo sapiens
atgatgaaagtggctctcagtggaaaggggagctgaaaaggggacagggggctatgtaatcttcccctggagtctggctgtctccagccrgattcttttttgaagtaatgtcgtcaagctgtgtctccgaagtcaagccacttctctgcgatgtccagctgtagtctctgatgtccaga

SEQ ID NO: 768 - DNA, 179 bp, Homo sapiens
aaagaaaagaaaaaaagaaaaggaaggaaggaaggaaagaaggaaggaaggaaggaaggaaggaaggaaggaaggaaggaaggaaggaargaaggaaggaaggaaagaaagaaagaaagaaagaaagaaagaaagaaagaaagaaagaaagaaaagaaaggaaggaaggaaggaaggaa

SEQ ID NO: 769 - DNA, 179 bp, Homo sapiens
gagcagaaaaactggaaactctaaaaagcagagcgcctcaccccctccaaaggaacgcagttcctcaccagcaatggaacaaagctggayggagaatgactttgacgagctgagagaagaaggcttcagacgatcaaattactctgagctacgggaggacattcaaaccaaaggcaaag

SEQ ID NO: 770 - DNA, 179 bp, Homo sapiens
tacgtacagttacaaaaattgacctcctggatattttttctcaggaaacttttgggcaacatattctataaacatgagtagaccaagagmgtagaagtcactggatgctgaaaataaataggaaatctcaagcggatttaacacaggatactaaaggaatttccaagagaacgagagag

SEQ ID NO: 771 - DNA, 179 bp, Homo sapiens
ttctgccagttaaactatatctcccccactgccacaataagtactaactcctagtacctgtaaatatgaacttatttggaaataagggtmtttgcaaatgtaattaaggtacacattaagatgaagttatattagagtagggtgagcccttaattcaatataactggtgttacaggaag

SEQ ID NO: 772 - DNA, 179 bp, Homo sapiens
acaagagaaaagcattgatagcaacaaacatagttgcttgcctgtttctgtcaaaaaaataattttgtacacatcaatggattcttatgrcctgttttattcttcgcatattttggcagaagttggctgttgagaatacattttacttcatttttcaaagtaattctttttttaaaaaa

SEQ ID NO: 773 - DNA, 179 bp, Homo sapiens
aggcatgagccactgcacccgggctcaatctacacaacttttattaaaaagaaaggaaagggtgcttaagaaaaaaatacccaaaagcartgaggtaaaaaataaatgaatacagtgtatctatacatatatgggacacatacattacatatgattctgctatgctgtgacaacctgtt

SEQ ID NO: 774 - DNA, 179 bp, Homo sapiens
ttaaaacagcttctgcattttgaatcaaagttagaaaggactctcctaacataattttataaagaagttctcttctgttctcttttctgrtacttaataatttcatttaaacctttgagtttatattgctttatggtataataaatacatctgtgtcttttctaagtggagttgcctga

SEQ ID NO: 775 - DNA, 179 bp, Homo sapiens
acagctctctgcttctcttcatatgccctgactttggatgctcctgcagtggaggctgacacaaatagattttgaaaagttgcttccaamatttttagaagcactgcatttcaagatcagtgtgattttatctgggaaggaagttagaggcaggatggcgggcaaaatagcacagaacc

SEQ ID NO: 776 - DNA, 179 bp, Homo sapiens
gggacagatttaagttttaaccagccagaatgaagagatctcaatgaacattcaggatttagatagagactctgaattggacatgttctrttagcaatactaaattagcactagaatagagtaaaaaccacaccacatccatcataacaaacttaataataaacctaaaaaatattaaa

SEQ ID NO: 777 - DNA, 179 bp, Homo sapiens
agaattggaatatttgtgaatagcagtaatgacagcatagattaagttttaaattcactaaagtgtagcgatcacctggaaggtagatayaatgcaaaactagattcgaagaggaattggacatatgtaatatacatactaaattgggtctaaaaatttagaagatagaaaagctactt

SEQ ID NO: 778 - DNA, 179 bp, Homo sapiens
atttgaagggtagaaaacagcaagaaagtgattctgtgcgctgagcttcaggactctgaccactatgcttcctcacggatgggtcacttytttttttctttttttttttttttttgagacggagtctcgctctgtcgcccaggccggagtgcagtggcgcgatctcggctcactgcaag

SEQ ID NO: 779 - DNA, 179 bp, Homo sapiens
tttaagtcatcattaggtactagccataaaacactgtaataaattaaagaaaccagaagtcattgattcagaaatggcaaatagatagtyagggcaattttatcttttgcaagcaacaatttctagagtgctctacatgtttgctttttactcaactttaactcatgtaacatctttca

SEQ ID NO: 780 - DNA, 179 bp, Homo sapiens
ggcatcaaacagatcccacagtgtctccttcctcaccatcaacaaggatgtccaagggtagaaagcaagtactgcatggggcaggcatamggagaggtgctgtcaagtttagctctcttaaaatcaattgaagccttcaccggtatggtcactgtaggggtggctggagtgaaacaagt

SEQ ID NO: 781 - DNA, 179 bp, Homo sapiens
tccaaaaaaagaaaggaaggaaggaaggaaggaaggaaggaggaaagaaaagaaagaaagaaagaaagaaagaaagaaagaaagagagaragagagagagagagagagaaagaaagaaagaaagaaagaaagaaagaaagaaagaaagaaagaaagaaagaaagaaagagaaagaaaga

SEQ ID NO: 782 - DNA, 179 bp, Homo sapiens
cacatcttcctgtcttctgagccctccaagtctctaggaatttccaaactttctcacatcaacctgtcttcttagccctccagactgttstaacctctagctattacccagttccaaaatcacttccacattttcaggtatccttatggcagcaccacaccctttaaagtaccagttta

SEQ ID NO: 783 - DNA, 179 bp, Homo sapiens
ttaaatctaggttatttaatcataagtaatatccctagctttaaaaatgacaggaaatattactgctcctcctcttctttctttctttcytttttttttttttttgagacagaatctcaccctgctgcccaggctggagtggagtggtgtgactgtagctcactgcggccttgaactcc

SEQ ID NO: 784 - DNA, 179 bp, Homo sapiens
cagtaaaaaatgtagtagtacatcaccttcaattttctcatgaagtacattctaccatcttttcagcctctctcttcttgccaaaggtamaactattttgaaggtattacccatagtcaccacatacagtcatttttgctctcttaaatcggatacagaaacactctatcaacaaaaat

SEQ ID NO: 785 - DNA, 179 bp, Homo sapiens
gaagatgataataactttgataaccatgatttggggataaaaactaaaacaaaagaaaattctgtgtgtgtgtgtgtgtgtgtgtgtgtstctgtgtgtgtgtgtgttcatcagtattatgattcttgttctcaagatatatgccaaaagcaccttccagaatctatctgcaaggagaa

SEQ ID NO: 786 - DNA, 179 bp, Homo sapiens
atttgtatttctctgatgattaatgatgttgagcatcttttcttgtgcttattggccatttgtattttgcttctccttcctctcctttgygtcgttgctgtcatttatattttacttctacatgtcttataaactaccaaagcacatcactatttttactttaagcaatcaaatgcttt

SEQ ID NO: 787 - DNA, 179 bp, Homo sapiens
cccacctgcctcggcctcccaaagttctgggattgtagacgtcagccactgcacccggcccttagcccactttttgaagggatttttttytttcttgctgatttatttgaaatccttgtagattcaggatattagtcctttgtcagatgtgtagattatgaagattttctgccactctg

SEQ ID NO: 788 - DNA, 179 bp, Homo sapiens
agaagagtctgtggcactaggggcctggtagtttccattattttgcctaaaaatcaatgttaatgtcaatgtctcaaaaatcaatgtcartgttgagttaaccatccaaagtgtggatgtttctactttcttagtaccttggagaggttctctggataaataacaaaaggaattagcta

SEQ ID NO: 789 - DNA, 179 bp, Homo sapiens
caaaacaaaaataagtttaagataacatctataagtataaatgctatataaatactagaaaatatttaatgtgtgtgtgtgtgtgtgtgwgagagagagagagagagagagagagagagagagagagagacagagagaggagattgcttactatttggtataacttgcaaaaaaaaata

SEQ ID NO: 790 - DNA, 179 bp, Homo sapiens
tggaggttgcaatgagccgagatcctgccactgcaccccaagcccaggtgattgatagtgcgacactccgtctcaaaaaaaatatatatrtatgtgtgtgtgtgtgtgtgtgtgtgtgtgtgtgtgtgtgtagcatcatttcttttatgtttactttctcagtgggatataccattggc

SEQ ID NO: 791 - DNA, 179 bp, Homo sapiens
gatggattaatgtggctggaggtgctaccttctctagggtactgttaccccaggattaaagcatgatagagatttcctgttatccagaayggaatagtgccatggccttttttaatccaaggagctgatactgagagcaaccacaaacccagatgtgtcttaaagagaaacctaaaacc

SEQ ID NO: 792 - DNA, 179 bp, Homo sapiens
tatttccatccttgccaatgatacacacacacaatgtaatgctgagagggttgggaaggaagaatgggagaaaggcagaagttgacagtwaaaaaaaaaaagtttccagatggttttcttagtgtcatctctgcaacctcatcaaataagggtccaaaatttatgttacaacatttgtt

SEQ ID NO: 793 - DNA, 179 bp, Homo sapiens
aatttttttcccttactttgaacttttttggggactattcctctgagtttccaaaagggaataagtatggggaataaataggatttagaktcagtttagacttcccacagagggtcatcgtgtttgaaacttctgtctaaagccaaattttctatgtatttattatcaaggataattgt

SEQ ID NO: 794 - DNA, 179 bp, Homo sapiens
aggacaccctgtcagaaagaaaagaaaaaaagaaaaggaaggaaggaaggaaagaaggaaggaaggaaggaaggaaggaaggaaggaagraaggaaggaaggaaggaaggaaggaaggaaagaaagaaagaaagaaagaaagaaagaaagaaagaaagaaagaaagaaaagaaaggaag

SEQ ID NO: 795 - DNA, 179 bp, Homo sapiens
tcaacatctaaatagttatactatggaattatctttttctaatttttatgtcacagaatgggagttttctggtttttcaagcactctgtkttgtctatcaaacttatggctttactgtatgaaaacagcaacatagagtatccgagaaagtactgatttctggaaagtattatcactct

SEQ ID NO: 796 - DNA, 179 bp, Homo sapiens
caggtctacagctctagcgggtccagtcccagtggacctttctgctaattgtgtccagcctttccattcttgaattactgacctgcgatraaaaatgatggcgcccttaccacattctagcaaaaaggtcaacagtcatttaccagttctgtgatcttaacactagttaccttgtttat

SEQ ID NO: 797 - DNA, 179 bp, Homo sapiens
ctcactgtagtagatcaaatgtgaggaagaaacagtagccgagagaggctggaattagtaaaaatttaagagtagttccatccattatgyatgccgtaataggccctatatgtgaaaagttaaaggagcttatttaattatgaaggaaactattatacaagtaagcaaaacaatttata

SEQ ID NO: 798 - DNA, 179 bp, Homo sapiens
catattttttgcttctgacaagaaataataattgacatattatatatgctcagtctatcaactaaaggagtagcatgcttctcatttatyctcttgagttacttcctagcaacaggagttgttgggagcagatggagacagtttgtaacgtcaaccaagaataatgcaaaatgttatca

SEQ ID NO: 799 - DNA, 179 bp, Homo sapiens
cccactttgtgggataaaaataacagtaattataaatttctctattttttaaaatagttttttaggcagaagcatccattgtttaaaatyagttaatttcaaaattaaaatagtattatttcagtggttagcaaaggatattgttttttgtttgtttgtttgttttgagatggagtctc

SEQ ID NO: 800 - DNA, 179 bp, Homo sapiens
atcctaagccaaaagaacaaagttggaggcatcatgctatctaacatcaaactatactacaaggctacagtaaccaaaacagcattgtaytggtaccaaaacggagatatagaccaatggaacagaacagagctgtcagaaataataccacacatctacaaccatctgatctttgacaa

SEQ ID NO: 801 - DNA, 179 bp, Homo sapiens
ctgcagagttttcggttaggaagctattgaccaataaaaactcgaaatgagaaaacagtttttttcattccttgcgactaaaattctcargcactcaaaaaggtatccaagaacagaaaaacataaattgttaatggtagcgtgattgcattctattctcttcccatttggtttctttc

SEQ ID NO: 802 - DNA, 179 bp, Homo sapiens
ctgcctccaagtgtctctgagtcatgaatatagagaattcttggggttttggaaagatggctcagttactatgttaaaaaatagtgatayagatgaagatgatgcatccaagatccaattggggaagtaatgataattatgtggttacatacatactctgatggctagtgacatgttac

SEQ ID NO: 803 - DNA, 179 bp, Homo sapiens
tcacatgcgcagttcacagtagggtttgtgctcctatgacaatctaatgcccccgctgatctgacaggaggtagagctcaggcggtaatrcttgctctctggcagcagcccacctcctgctgtgtggccgagttcctaagaggccatggacaggtcccagtccctggctcaagggctgg

SEQ ID NO: 804 - DNA, 179 bp, Homo sapiens
aaatgaagagccatcataaatatgatcatttgctcaatgaagttcaattttctatctagccagcaaacatgtttttttttttttttttawttacaagaaatgcaggattgaatgcctctgagaagaaccgccacaatctaaccatcttgtcaattccattccctggaacctcaggagtt

SEQ ID NO: 805 - DNA, 179 bp, Homo sapiens
aaaaccatcagatcttgtgaaaactcactcactatcatgagaacagcatgcagataaccgctcccatgattcagttacctcccaccaggwctctcccactatacatggggattatgggaagtataattcaagaagagatttgggtgggaacacagccaaaccatatcattaactatatg

SEQ ID NO: 806 - DNA, 179 bp, Homo sapiens
tccccatttcttgtttttgtcaggtttgtcaaagatcatatggttgtagatgtgtggtattatttctgggggcttttttttttttttttktagtttacagacgtaaaacaggatcctggcagttcagcctgctctctagcattcattaacatgccacagtctagcaggcagatcacctt

SEQ ID NO: 807 - DNA, 179 bp, Homo sapiens
ggtcgttcaaatgctggctgaggatccctaagtatgaattccctagccgactatttcacaagttaactatccaccgctaagacgtcctcyaaaacacaaacacacatttctttattagtgttagaggatatgaaataatttacttgaaaatacaataatactgttttctcttcagaaga

SEQ ID NO: 808 - DNA, 179 bp, Homo sapiens
tcattctggcctcaagatgctttgttggggtgtctaggtgctccaggtgcttctgggagaggtgacctagtgagggatcagtgggaatasaggtgatattgtggggcttttctggaaattgcagagaggtgcatcgtttttataatttatgaatttttatgtattaatgtcatcctcct

SEQ ID NO: 809 - DNA, 179 bp, Homo sapiens
aaataaacgggactgaaaaatcattctggcctcaagatgctttgttggggtgtctaggtgctccaggtgcttctgggagaggtgacctastgagggatcagtgggaatagaggtgatattgtggggcttttctggaaattgcagagaggtgcatcgtttttataatttatgaattttta

SEQ ID NO: 810 - DNA, 179 bp, Homo sapiens
aggtcgaggtttgagaccagcctgaccaacatagagaaaccctctctctactaaaatacaaacattgggtggggcgagtcatcgtctgamgtctggccgtgagatgtttcgggagccggggtctctccgctgcagacatgacgaagggccttgttttaggaatctattccaaagaaaaa

SEQ ID NO: 811 - DNA, 179 bp, Homo sapiens
actagcgaggaggtgactcactgtgacaaggagaccccagggaacggactgtatgaggtcagaaccccgcccgggatggggtacagcggractccagaagccctctcccctgccccttcgcggtctccgtcctcccatcggcacagtgacctatttggctggaacagtttgttcccaag

SEQ ID NO: 812 - DNA, 179 bp, Homo sapiens
tacaggagtgaggcagtgtgtggccccagactttgatgttgactagtttaaaaagaaaaaggaaaagctgtgtaccagaaggaggaaatygggtcctgctgtgtaactttaggctagtctcactgtctctttgtggcctggtttcctcctttgggaactgaagaggatcatgcctacct

SEQ ID NO: 813 - DNA, 179 bp, Homo sapiens
gggcacagtagctcatgcctgtaaccctagcactttgggaggccaaggcgggcagatcacttgaggtctggagttcgcaggatcttagamtcactaagatccccttacctactttagtttgaggcctcttggaaataatctggaccagctttcatattttattgctgtggagatacagg

SEQ ID NO: 814 - DNA, 179 bp, Homo sapiens
gacagagttattgcatttaattctcacccttgccctgcaaggttggtactttttattttttttgagacagagtcttactctgtcacccargctgaagtgcagtggcataatctcagctcactgcaacctccgtctcccaggttcaagcaattctcctgcctcagcctcccaagtagctg

SEQ ID NO: 815 - DNA, 179 bp, Homo sapiens
tatgttggctagctggtctcaaactcctgacctcaagtgatcctcccactttggcctcccaaagtgctgggattataggcatgagccacmcctcccagccctggagcagcttttaagcacagtaaaaagtggtgtcatatagttatctattgttgtgaatgataccacctcaaacttgg

SEQ ID NO: 816 - DNA, 179 bp, Homo sapiens
ggactacaggtgctgccatcatgcccggctaatttttttttgtatttttagtagagacggggtttcaccgtgttagccaggatggtctcratctcctgacctcgtgctccgccctcctcggcctcccaaagtgctgggattacaggtgtgagacactgcacccaaccacccagctaatt

SEQ ID NO: 817 - DNA, 179 bp, Homo sapiens
ggctggtcttggactcctgacctcaagtgatccgcctgcctcggcctcccaaagtggtgggattacaggcgtgagccaccacgcccagcytattactcttggtggaggcagagaatgagggtgaggaatcacacagcaccctgtatagtgccagcctggggtccaggatgcatagacgg

SEQ ID NO: 818 - DNA, 179 bp, Homo sapiens
gaagcactttaaaagtgtaaaggggccgaggcgggcggatcaactgaggtcgggggttcgagaccatactggccaacatggtgaaacccyggctctaccaaaaatacaaaaattagctgggtgtggtggcgggtgcttgtagtcccagctacttgggagactgaggcaggagaattgct

SEQ ID NO: 819 - DNA, 179 bp, Homo sapiens
ctaccttatagatctttttaagacatcattccagcccaggcgcggtggctcacgcctgtaatcccagcactttgggagtacaaggtgggygggtcacctgaggtcaggagttcaagaccagcctggccaacatggtgaaaccccatctctactaaaaatacaaaaattagtcgggcgtg

SEQ ID NO: 820 - DNA, 179 bp, Homo sapiens
cggtgtctctaagtgcgcgggtgacgagagtcgggatgtgccggagaccccggggcggagagcgggattacaagtacaggaatccctggycacgctccccgcccctggaaacccagctggggcgagggagggcgtggacgggaccgttctgggagctcgcctttggctgcggttggctc

SEQ ID NO: 821 - DNA, 179 bp, Homo sapiens
tgccctggagggggtaacacaatggacctgctcctctctccagaggcagccattgccactgtttcctgtgtctctccttttttttttttktttttttttttgagacagggtctcactctgctgcccagactggagtgcagtggcacaatcttggctcactgcagtctcgacctcctggg

SEQ ID NO: 822 - DNA, 179 bp, Homo sapiens
attctctctctatcttgcctctcctgtgtcctccttcagctcgggttattctggtccttcaagttttagaactgtggccccccaggtgtyacatctgccccccagagaccgctacttccctgatctttattcagccacacacacaggtgggttgatggtgaaaccgatgaaaggaggct

SEQ ID NO: 823 - DNA, 179 bp, Homo sapiens
cattctccaggatagaccttatgttgggccacaaaacaggtctcaataaatttatttttattttttaattaatttatttatttatttatytatttatttatttatttatttttgagatggaatctcgctctgtcacccaggctggagtgcagtggtgtgatcttggctcactgcaacct

SEQ ID NO: 824 - DNA, 179 bp, Homo sapiens
actttgtctcttcctaggcttctctgaccagaagcagcaactggggcactggtttaaaatattcattccctgctgggcgcggtggctcaygcctgtaatcccagcactttgggaggccaaggcgggctgatcatttgaggtcaggagttcgagatcagcctgaccaacatggtgaaacc

SEQ ID NO: 825 - DNA, 179 bp, Homo sapiens
caggtgtttctgcggcaggtgaatgacgggcgtgggtcggtgcgcgctcggcttgcgcacacggtgtctctaagtgcgcgggtgacgagrgtcgggatgtgccggagaccccggggcggagagcgggattacaagtacaggaatccctggtcacgctccccgcccctggaaacccagct

SEQ ID NO: 826 - DNA, 179 bp, Homo sapiens
attgatattgaagataagtctgttgttactatatttgagttcctttgtaggtcatcatcttatttccccagaggcatgtaagatttttcyttttgtctttggtgtactgcatttgctcatatatgtgtgtctacctgtggaattagaaaaatgattctgctcagggctcaatatgattc

SEQ ID NO: 827 - DNA, 179 bp, Homo sapiens
agcggagcccacgcctggatgggaggcggggagggttcatgtctttgaggggtggggggtctggggggcacgacgctgctcagggcctcyatcagctgcctcgggggctcagggcttcccgacctagcccagattccctctccgaaagctacagggctgagcggagcaggggggcgagt

SEQ ID NO: 828 - DNA, 179 bp, Homo sapiens
ctgtaatcccagcactttgggaggctgaggtgggtggatcacctgaggtcaagagtttgagaccagcctggccaagatggtgaaactccrtctctacttaaaaaatactaaaattagccaggcatggtggcgcaaacctgtagtcccagctactcaggaggctgaagcaggagaatcgc

SEQ ID NO: 829 - DNA, 179 bp, Homo sapiens
ggaggaatctattcctcagccccaactgagtcaagctcggccatgtgatgtgctttcaacaatggaatgtgataaaaaaatactgtatgycatacattacttgactcctcagattcatcacctgctactggaattggtcttttctctggggaaataccatgataggggctgttccttca

SEQ ID NO: 830 - DNA, 179 bp, Homo sapiens
tggtagccagttcatgagaagtgtcattggcctcaggacccctgatcttgcagctgacatctttgtagagcagtcttactggggactgcrcgcttaaccagtggagtctgcattaactccaggtggttactgccagaattgcactgcagtagggcttgtgtctttcttcactttggaaa

SEQ ID NO: 831 - DNA, 179 bp, Homo sapiens
agggagggggcatggaagctccatgtttgggatgctccccaacctcaccctatgtttctcttcatttggctggccctgattgtatccttrtaataaaactgcaattgtaaatgtagcacttttgtgaattctgtgaattatctcagcaaattatggaagctgagggggttgtgggaccc

SEQ ID NO: 832 - DNA, 179 bp, Homo sapiens
ctggttagcgaacacaacaatgtgctagaaaagcaacatgttggccaggtgcagtggctcacgcctgtaatcccagcactttgggaggcygaggtgggtggatcacctgaggtcaagagtttgagaccagcctggccaagatggtgaaactccgtctctacttaaaaaatactaaaatt

SEQ ID NO: 833 - DNA, 179 bp, Homo sapiens
tatgttggccaggttggtctcgaactcctgaccttgtgatccacctgccttggcctcccaaagtgctgggattacaggtgtgaaccaccrcgcctggcccaccatgaaggcttaaagagtgaaatgttatctgcgagtcttagtacagttctctctaaatcgacagcagggattgcttg

SEQ ID NO: 834 - DNA, 179 bp, Homo sapiens
cagttttggcgggcgagcagcgccttgcaggaaactgactcatcactactccctccagcggtccgaggctctgcccacgcacctcccacyccgcgcgtgatttcctggaggccggcgccccctcccggccctggcgggaatagcacacaggctttcccgcggagtggggctggccggcg

SEQ ID NO: 835 - DNA, 179 bp, Homo sapiens
aatcgcttgaacccgggaggcggaagttgcagtcagccgagatcgtgccactgcactccagcctgggctacagagcaagactctgtcccmaaaaaaaaaaaaaaaaggtggggagatgaggaaggaatacacttaaatatacctgcatttgtttagataaagcataaaaaaactttcat

SEQ ID NO: 836 - DNA, 179 bp, Homo sapiens
aagtaagggaagagagcttcttagagatttagggtcttttcctgattttcattcatggtgaagattgggcattagattttttgtcagccrtgtgtcatggaatatattgaatctagcagttatttacaaagtgaagtgaactttgttttttgaggtggagggagcatctaggaagcgta

SEQ ID NO: 837 - DNA, 179 bp, Homo sapiens
taagagaaggaggggtggtagaagaggagagggtgcctgcctagatcctagtcctgtcttgaactcccgagagccagggaatatccagcwccttgatgaagccctaggcgggcgcctcctccttgtgcctatgatgtattgagacccagaatgtccatttcaaacataccagtgtgtct

SEQ ID NO: 838 - DNA, 179 bp, Homo sapiens
caaaaatacaaaaattagctgggtgtggtggcgggtgcttgtagtcccagctacttgggagactgaggcaggagaattgcttgaacctgygaggcagagattgcagtaagccgagatcatgacactgcactccagcctgggcaataaaagcaaaactccacctcaacaacaacaacaaa

SEQ ID NO: 839 - DNA, 179 bp, Homo sapiens
ggctgggatctgatgcatgtgtgcttgtgtgagtgtgtgctgggagtcagattctgtgtgtgacttttaacagcctgctcccttgccttyttcagggcagaagtcctcccttagagtgtgtctgggtacacattcaagtgcatggttgcaaacttttttttttaaagcactgaatagta

SEQ ID NO: 840 - DNA, 179 bp, Homo sapiens
ccgggcaggaggcaaaagtcctgtgttccaactatagtcatttctttgctgcatgatctgagttaggtcaccagacttctctgagccccmgtttccccagcagtgtatacgggctatgtggggagtattcaggagacagacaactcactcgtcaaatcctccccttcctggccaacaaa

SEQ ID NO: 841 - DNA, 179 bp, Homo sapiens
tgcactattagggtgtcaagaaaatatggatatagggcaacaatcctgtgattgtatgatgactgtaggcttgatcatcataagggtccwgccatatgctggtccagttggcacacccacccatctcctgtgccagtggagtgtgcctgtgaaacagcagtcagctcttctggtggccc

SEQ ID NO: 842 - DNA, 179 bp, Homo sapiens
atgcactattagggtgtcaagaaaatatggatatagggcaacaatcctgtgattgtatgatgactgtaggcttgatcatcataagggtcmtgccatatgctggtccagttggcacacccacccatctcctgtgccagtggagtgtgcctgtgaaacagcagtcagctcttctggtggcc

SEQ ID NO: 843 - DNA, 179 bp, Homo sapiens
gtgtgtgtatatatatgtgtgtatgtgtatgtgtgtatgcatatatacatatatatgtgtgtatagtgtgtgtgtgtatatatatatatmtacaacaattgccatgaggccatgctgtgcagaagttgctgttcttcgatttccatgagcccctctgaatccttccataaagcctaaaa

SEQ ID NO: 844 - DNA, 179 bp, Homo sapiens
tatctgaattccctatgtccactaagaatagtgctttgtacacagctactttctaaatgtatgctgctaaattttaaaaagtcagaatgyatagcaatgtgcagacacattcatgactactacttacaattagcccccttttctaatctaatttagggtcccctcttggcatagcctga

SEQ ID NO: 845 - DNA, 179 bp, Homo sapiens
aaaaaggagcctagatgctgtctttctgagctgtcagtatagaaaagcaggttcttgggcagtggggagggcatgaaaggccaccatctsaacacagatattttccaagggccacctctgcagttgctatttactgcatttactgccaaagaaactcactacagatgaactttgtggac

SEQ ID NO: 846 - DNA, 179 bp, Homo sapiens
cagtgcaactgtatttcgcacagtgctggtgtgtggtagccttttttgttacattctcttcctcaggggcatgtgtgatcaatagccttsagagttccatcaactatgttattgactttagggtctctggtttccagttgtttcctttctccctttgttttctattcctgtaactttta

SEQ ID NO: 847 - DNA, 179 bp, Homo sapiens
aagaaataccaagagagaagacaaaacatggctgtgccaaggactgaggagtgagctttacaaggacttgtcagctggctctgtacttcyattgggctggttccttcaccatttccaaaggggttctggagaccttgcaggaacaggaacagcaccttagccaagagggttccaggcct

SEQ ID NO: 848 - DNA, 179 bp, Homo sapiens
ttcatccctgctttctcttggaattctaaatctagtttactataactgcatctagagaagccttcctctcctaggtacttaataattaayctgtccctctgaattaacacccaaatccggaagcacactacccctcaagttcctctgttattgagccaaaacccttctcatgtgtacca

SEQ ID NO: 849 - DNA, 179 bp, Homo sapiens
ggtttcaccatgttggccaggctggtctcaaattcctgacctcaaatgatccacccgcctcagcctcccaagtgctgggattgcaggcamcatggctggccaacagtggcttcttaaaaaatttttttacagatagaatcttgctctttcacccaggctggagagcagtggtgcaatca

SEQ ID NO: 850 - DNA, 179 bp, Homo sapiens
gaggaaaggggggtgggggcatggaggtcaatactcaggccttactcagccagctaacaggacactattaacacaaagggaaatagtaastgattcactttctggagtatttcaaacacataaaagtaaaggtacaaccaacccatgtaaccattttgtaaacaattttttaaacaagg

SEQ ID NO: 851 - DNA, 179 bp, Homo sapiens
aactgaggtcgggggttcgagaccatactggccaacatggtgaaaccccggctctaccaaaaatacaaaaattagctgggtgtggtggcrggtgcttgtagtcccagctacttgggagactgaggcaggagaattgcttgaacctgcgaggcagagattgcagtaagccgagatcatga

SEQ ID NO: 852 - DNA, 179 bp, Homo sapiens
tttgagacagggcctcactctgtcacccaggctggagtgcagtggcacaatctcagctcactgcaacctctacctcctgggctcaaagcratcctcccacctcagcctcctcagtagctgggactacaagcacataccaccatgcccagctaatttttgtactttttgtagagacgggg

SEQ ID NO: 853 - DNA, 179 bp, Homo sapiens
taagttcaggagttcgagaccaacctggccaacatggcaaaaccccatctctataaaaaatacaaaaattagctgggcgtggaggcaggygcctgtaatcccagctatttgggagactgaggcaggagaatagcttgaacccaggaggcggaggttgcaaagagcagagatcacaccac

SEQ ID NO: 854 - DNA, 179 bp, Homo sapiens
aaactccactcactcagatctgcctctagatcattcctgaccttcacacctcctcaccaatcaaactgatttttaattaattaatttctratttttttttgagatggagtctcgctctgtcatccaggctggagtgcaatggcatgatttcggcttactgcaacctctgcctcccgggt

SEQ ID NO: 855 - DNA, 179 bp, Homo sapiens
gtcatccaggctggagtgcaatggcatgatttcggcttactgcaacctctgcctcccgggttgaagcaattctcccacctcagtctgccractagctgggattataggcatctgccatcatgcccagctaatttttgtgttttctagagacggggtttcaccacgttggtcaggctggt

SEQ ID NO: 856 - DNA, 179 bp, Homo sapiens
ccagtcctatttttgaaggcatttccactaccatttcagttccttgcacagtcccttgttaactatattttctcctactgtatctgtggrcactgggtggaagggctgatttgagatggatattttgccttaataaagatttcaggaacatgacacaccggggcctgtcggggcatggg

SEQ ID NO: 857 - DNA, 179 bp, Homo sapiens
tagttgtgggtagttgtggtttgtggaagtcaatgtctcccagtgaggtatacctctgggtattcacactgttttgtagttgcctccccktgaacatttctggcttgtgactcttttagccaatagaatgggacagaagtaaccctgtgcccattccagacctaagccttaaaaaggta

SEQ ID NO: 858 - DNA, 179 bp, Homo sapiens
tgggattgcaggcgtggagcttctatgccccgcccaggctaactcgttgaggactgaggcagctggtggaagccaatgctcatttattgwtctgaaattcccaagacccttaattgtgctgaatttactctgcctgtgccctataaatggaacgaagcctgggtgacagcccatctgtt

SEQ ID NO: 859 - DNA, 179 bp, Homo sapiens
tggtgcatgcctgtaatcccagctactcgggaggctgaggcaggagaatcacttgaacctaggaggtagaggctgcagtgagccaagatsgcaccactgcactccagcctgggcaacagagtgagacttcatctcaaaaaacaaaacaaaacaacaacaaagaaacaagcaaagaaaaa

SEQ ID NO: 860 - DNA, 179 bp, Homo sapiens
cactccgtgcattgcaacagacattgcctaatgccagcttgctgatggaattagattgtctctagcaagacctgtgggaatggggcacargatagaatagttctgagcctgggtgagggagggtgtgagaagggtcagtgacttagcgagggggaaacatgatagaagaggtagagggt

SEQ ID NO: 861 - DNA, 179 bp, Homo sapiens
actgcaacctctgcctcccaggttcaaacaattctcctatctcagctttccgagtagctgggattacaggtgcccgccatcacgcctggmtaattttttttatttttagtagagatggggtttcaccatcttggctagtctggtcttgaactcctgacctcgagatccacccacctcgg

SEQ ID NO: 862 - DNA, 179 bp, Homo sapiens
ggagaatgacgtgaacccaggaggcggtgcttgcagtgagtcgagatcgcaccactgcactccagcctgggcgacagagcaagattccgyctcccaaaaaaaaaaaaaaaaaagcaaacccgagggaatggaggggagacccacctagggacaaagaagtcacgcctgtctttgtatta

SEQ ID NO: 863 - DNA, 179 bp, Homo sapiens
taggcgggcgcctcctccttgtgcctatgatgtattgagacccagaatgtccatttcaaacataccagtgtgtctccgcttggctggcamcccaagagtgcccatctgaggaattgtgccaaacacttgcttgaatcttcaatctggattaagttggtctcgggaggcagggcctcagc

SEQ ID NO: 864 - DNA, 179 bp, Homo sapiens
gtaatcaaggactagactgtgggctgctcgtaattatcgcagaagtccagggaagggtgagggaggtatgtgtgggactcacgctgtcckctcagcagcatgtttatgagacttgtcaatgtcactccagtctagttcattcactcattttaactgccatacaatttactcttaactag

SEQ ID NO: 865 - DNA, 179 bp, Homo sapiens
tttctctttctctctttctttcttttctttcgacagagttgcactctgtcacccaggctggagtgcaatggcaccatcctggactcaagyagtcctcctgtttcagcctcccaagtaaccgggaccacaggcgtgatccccccgcccccatgcccagattttttttttttttttttttt

SEQ ID NO: 866 - DNA, 179 bp, Homo sapiens
gtctatttctgttttaatcattatagtcttataataaagggttcatcacatatgacaagcaatctcctcctcttcttcctccttttttcktcttcaaatattgcctccattatgtttggccctttctttgccccatgtgaaaagctctgctgggctttcgactgaaattgcatctttcc

SEQ ID NO: 867 - DNA, 179 bp, Homo sapiens
ggaagaacattctacgcagaagcaaaagtctcatcgttagttagaagccgaaaaggaaccagggctagatctttttagttagtcattttwttgatggatctgaccagtttccttgtcgttacaaccatccttgtttgtgtctcccatgctcacatgacatgtatatcattctagggtat

SEQ ID NO: 868 - DNA, 179 bp, Homo sapiens
aaaaaaaagatgaagaaagaaagaaaagatttttcagacctaatttaactcattcagtttgatgaatactgctgcaaacctacttggccrggctgtgacggtcatggacggcagtggtaggaactaaaacctgtaaaaaggacatcaagcagtggggtgtaatcaaggactagactgtg

SEQ ID NO: 869 - DNA, 179 bp, Homo sapiens
ctgctgggctttcgactgaaattgcatctttccatttgtaaatatagttgatctttctattctggtctttttgtgtccttcagtaaagaytttgtgtgttttattagatttacttttcccttgtagttttattttttattgctacgggaaatgggaccttttttacctatggcattttc

SEQ ID NO: 870 - DNA, 179 bp, Homo sapiens
ggaaagaactattttgcccttttagatgtattaagcagttttcctgggaaattggtcaagagaaccgactggtgttgtgtgaacttctcrgaaagagcaggtctggccctgccagaaggcagctgagagagttgggctgggctgagttccaggaaacagagtaggggctagttaggagt

SEQ ID NO: 871 - DNA, 179 bp, Homo sapiens
actggctgagaatgggcttaggtgcaagttgggagacactggatcatcgccaagaataagggcaaagtctggccgagcgcagtggctcamacctgtaatcctagcactttgggaggccaaggcgggcagatcatgaggacaggagttcgagaccagcctggccaatatggtgaaacctc

SEQ ID NO: 872 - DNA, 179 bp, Homo sapiens
cccatttgttccaaatagaggtaacagcacacacacacacacacacacacacacacactctctctctctctctctctctctctctatctmtctctctctctctctctctctctctctccaaagtgttttatatccataaatgtgcagagtgctgggttaggtaaaagttacatgtttct

SEQ ID NO: 873 - DNA, 179 bp, Homo sapiens
tattactaaaagtatatcccttggatttcctagaagtttgtctttaaattattctttacagcctatgcagttgttcctttagagagtttwaggtaatagccaagtagaggagtatcctggacactgaagaccttaccctggaaattctattatatgttgaccagcttttttgtaggagt

SEQ ID NO: 874 - DNA, 179 bp, Homo sapiens
tgggagaagcagaggtctgtctgacttcacagcaatgggactggaagtcactttctcttgtgagcctccttttctgcatctccaggtcaygagagtgggactgaccctcatagttctgaggctcagtgagtctttcttttaattttacttttttatttttttgagacagaatctcactc

SEQ ID NO: 875 - DNA, 179 bp, Homo sapiens
ccagttgcagtggctcatgcctgtaatcccagcactttggaaggctgagacaggtggatcaggggttcaagaccagcctggccaaatggygaaaccccttctctactaaaaaaatacaaaaattagccaggcgtggtggtgcacacctgtagtcccagctactcgggaggctgaggtgg

SEQ ID NO: 876 - DNA, 179 bp, Homo sapiens
agtgggattcatttgctctcatgtttggcttcaagttttatgcgatttcttaggtgagggatgtggggagaggtggtcatgctgaggggmtatatgtgtgtcctagccatgaaggggtcccccactcttaaggacgtgaggcatgaggatgcactaaggggaaagtggtggaggagaag

SEQ ID NO: 877 - DNA, 179 bp, Homo sapiens
tgattacaggcgtgagccactgtgcctggccccaaaacagtgtttttaaaacttttatctttgctactttcttagtaagtaaaaaaaaayggcagaatctcatgattggcatgagttttaattacatttcttatttcatgagtgaggctgaatttttttttttttttttgagatggtgt

SEQ ID NO: 878 - DNA, 179 bp, Homo sapiens
caacacgacaaagccacacagtggggaaacatgatgcctccagagcatggtaaacagtgcaagtcaactgacgtcaggagttgaaaggckttgcctttcctgtggtccaagagccccctgccatatctgcactccagctagtcggaaagggaaaagggaagggcacagtcctttagagc

SEQ ID NO: 879 - DNA, 179 bp, Homo sapiens
taagtagagtgaacttcagaaatattttgagtagccgccatcgaggatggaagggttgcagggcgtgattaaccagcagaaagttatgargccccctgtgtggctgctgtggcatctccatcctgcctcatcactgggggtcttgcacgtggcagtcacatagtgtgtgttgttcatgg

SEQ ID NO: 880 - DNA, 179 bp, Homo sapiens
atggtgcaatctcagctcactgcaacctccgcctcctgggatcaagtgattctcctgcctcagcctcctgagtagctgggattacaggcmcctgccactgcgcctaattttgtatttttagtagagatggggtttcaccatcttggtcagactggtctcgagctcctgacctcgtgatc

SEQ ID NO: 881 - DNA, 179 bp, Homo sapiens
aaaaaaaaaaaaaaaaaaaaaggttctacctagtacgtgctatagtaggtagatataatgttatatgtattaattcattgaatcctttcracaaccctatgaggaaggcactgttattattccttttttgtttttcagacaggttctctctctctctctctgtcacccacgctggagtg

SEQ ID NO: 882 - DNA, 179 bp, Homo sapiens
ctgcccactcctgccagggttattgcctgggcagagcacagcatgctgaggggctccacccaggtgtgcctagtccacgtcaagcatgtygagtgaggtggtaccatccacccacacccaagggggtggtgggccaggaaggcggcacccaagagctgtctttggtgctgaacaggacg

SEQ ID NO: 883 - DNA, 179 bp, Homo sapiens
gtctcatcgttagttagaagccgaaaaggaaccagggctagatctttttagttagtcattttattgatggatctgaccagtttccttgtygttacaaccatccttgtttgtgtctcccatgctcacatgacatgtatatcattctagggtatttgtgtcattaactttgttaatgactt

SEQ ID NO: 884 - DNA, 179 bp, Homo sapiens
agattatgaaaacaatgtgtactccctgcagaaattttagaaataaattttaaagaagaaaatgaaaattaccctagtcttaccacttaygatagttactattgacatctgttttattttatttccttgctttcttacagctgaggaaactgaggtagagaaacattaagtaactctcc

SEQ ID NO: 885 - DNA, 179 bp, Homo sapiens
gttcaatgcaaagtaaaaaaatatgaattgtccccaatcccggtcatgcttttgccactttggcttctcctgtgaccccaccttgacggkggggcgtagacttgacaacatcccacagtggcacggagagaaggcccataccttctggttgcttcagacctgacaccgtccctcagtga

SEQ ID NO: 886 - DNA, 179 bp, Homo sapiens
gtgtgcacaacaggacccagcacaacttctcccatggagacagagcactggagaagtgttttggttggcctcccacactagggccagtgytacctttggcagctcctgcccacccagtaactgaaattctcctggggccctggagctgaggctggctggttattgtcattgataggtgg

SEQ ID NO: 887 - DNA, 179 bp, Homo sapiens
agagagagagagagaatgtacttctgtttgaagtttggggcctcctaaggatgagagattgcttcatccagttctgtgcaacctgtgccrttccccttgggaagcttgcccaaggggaggccgtggaatgaccccctggaatgagcccatgaggcctaaagcagagccctctaaccact

SEQ ID NO: 888 - DNA, 179 bp, Homo sapiens
gtccttgatgagattcttgtgtgactgcaccaacccccacaccatttgtgtgtgtgcttcctatgatgacagataactcaatgtctttgyttttagtcactgttcccttgatatttgctgctgaaaacctcatggccagtgcaagagctcttaaatatttctagtaaaatgtagccctt

SEQ ID NO: 889 - DNA, 180 bp, Homo sapiens
tggtaataagagaagtgacgtgattaggactcttataaacactcaatgggagtggaaactggcacacccactctagagagcaatcgagcarctccttgcagagttgcagaaatgcccattgtattaaccatgctttcttattttgtgaatttttgatgttctggcatttgtggcctcact

SEQ ID NO: 890 - DNA, 179 bp, Homo sapiens
gccgagggggcgtctcctccggacgcggcggcggttcggacccccgagtcgaaaggccgcggggctgagctgggcgcgaggaacctgtgkgcagcggcttgatgggctcctgtttccgcgcggagggcagagtctggtgatcctggggagggaggcgacgctgcgcccaggtggtgggc

SEQ ID NO: 891 - DNA, 179 bp, Homo sapiens
tctttctttctttctttttctttctttctttctttttctttcttttctttctttctttctttctttctttctttctttctttctttcttyctttctctttctctctttctttctctttctctctttctttcttttctttcgacagagttgcactctgtcacccaggctggagtgcaatg

SEQ ID NO: 892 - DNA, 179 bp, Homo sapiens
gggcctgtgagctggatagggcagagctgcgctggaggaagaggtggctcaggggaccgggtggggaggacagagttggtaatggcaggrgtgggaagggcagggtgtgtcttggtacaggacccactgtgacgcccaactccagggggcctgctcccgtagactgtaatgcatgtggt

SEQ ID NO: 893 - DNA, 179 bp, Homo sapiens
tcctgcctcagcctccttagtagctgggactacaggactacaggcacgtgccaccatgcccagctaatcttttcttcttcttcttcttcytcttcttcttcttcttcttcttcttcttcttcttcttcttcttcttcttctccttctccttctccttctccttcttctttttttttttt

SEQ ID NO: 894 - DNA, 179 bp, Homo sapiens
aaaagaaagaaagaaaagtaaaaagaggctgggcacagtggctcacgcctgtaatctcagcattttggaaggctgaggcggaaggatcamctgaggttaggagttccagaccagcccctggccaacatggtgaaaccctgtctctattaaaaaaatgcaaaaattagccagttgtggtt

SEQ ID NO: 895 - DNA, 179 bp, Homo sapiens
aagatggtctcgatattctgacctcatgatccgcccgcctcagcctcccaaagtgctgggattacaggcgtgagccactgcacctggccyccccttcctcttaatgagggggagtgtcttgagaagggtgacccacagcccagtgagggccaaaacggtggcagagaagaagacgtagc

SEQ ID NO: 896 - DNA, 179 bp, Homo sapiens
atctggggcaggcagtgagactggcagcaatctcggcccccaggttgcactgcgcaacaccgggcagtgccgcggtgaccgtgcctcccktctgagcctcagcttctgcatgtgaataccgagaacggtacgatgcccttcatcgaggccatctgtggagatgcctgatagggcgcctg

SEQ ID NO: 897 - DNA, 179 bp, Homo sapiens
cacaatttagaaaagccgtagttggccgggtgcggtggctcacacctgtaatcctagcacattgggaggctgaggccggcagatcacaargtcaaaagatggagaccatcctggccaacatggtgaaaccccgtctctactaaaaatacaaaaattagctgggcttggtggtgtgtgcc

SEQ ID NO: 898 - DNA, 179 bp, Homo sapiens
ttctttctttcttttgagacagagtctcgctctgttgcccaggctgacatgcagtggtgtgatctcggcttactgcaacctccgcctccygggttcaagagattctcctgcctcagcctcccgagtagctgggcttacaggcacccaccaccacgcccagctaatttttgtatttttag

SEQ ID NO: 899 - DNA, 179 bp, Homo sapiens
agaaaggaaagtcaggaatgccacatgtcctaggatgtggctgcagggaatttcttccaggattctaacatcctacacctgtgggagccyggcaggctgcgatgtgacactcacatcacagtggactttgcttctggaggcttctgcacagggaatcttatcttgctcccttggccgtg

SEQ ID NO: 900 - DNA, 179 bp, Homo sapiens
gctgggattacaggcaaacaccatcgcacctggctaatttttgtatttttagtagagacggggtttcaccctgttggccaggctggtctygaactcctgagctcaggtgatctgcccacctcagcctcccaaagtgctgggattacagatgtgagccaccccgcccggccttcatttta

SEQ ID NO: 901 - DNA, 179 bp, Homo sapiens
atcactccacctggatctttctcattttcttcacggtgcagagtatgccaatgttcggatgtatcagagctcatttaaccagctccctamtgatggaaatttagatcatttccaatcctttgctaccacagacaatactgtaatgagtatccttccatactgtcatattgtatatcatc

SEQ ID NO: 902 - DNA, 179 bp, Homo sapiens
tggggtttcaccatgttggccaggctggtctcgaactcctgaccgcaggtgatctgcctgcctctgcctcccctaagtgctgagattacwggcatgagccaccgtgcccggccaccaaagcaattaagttttaaaaagcttaaaactatgtaatttgtaaaaacactcttttcacatag

SEQ ID NO: 903 - DNA, 179 bp, Homo sapiens
ttgctctacatgaaaagaggctaggccgggcacggtggttcacgcctgtaatcccagcattttgggaggccgaggcgggtggatcacgargtcagcagatcgagaccatcctggctaacatgatgaaacctgtctctaccaaaaaatacaaaaaaaaaaaattagccaggcgtggtggc

SEQ ID NO: 904 - DNA, 179 bp, Homo sapiens
acccaatctccaacacagaaatgagtgactgtgtgtgcacatgcgtgtgcatgtgtgaaagtatgagtgtgaatgtgtctatatgggaamatatatgtgattgtatgtgtgtaactatgtgtgactggcagcgtggggagtgctggttggagtgtggtgtgatgtgagtatgcatgagt

SEQ ID NO: 905 - DNA, 179 bp, Homo sapiens
ctaaacagaaaagtacctgtgcagctgttgacacctgtggcctatggagaaatacagcaaatgtaaattataaacaattctggccgggcktgatggctgacacccgtaacctcagcactttgggaggcagaggtaggcggatcccctgaggtcaggagtttgagagcagcctggccaac

SEQ ID NO: 906 - DNA, 179 bp, Homo sapiens
atgggccatttaaacatttataaagagatttcattcaattgtcattttctttttttttttttcttttttcttttttttttttttgagacrgagtctcgctctgtcgcccaggcgggactgcggactgcagtggcgcaatctcggctcactgcaagctccgcttcccgggttcacgccat

SEQ ID NO: 907 - DNA, 179 bp, Homo sapiens
cactgattacagaatccattccaccgggcaatggagtggtttccacaccaggctcacttgtgctgggcacgagcgggaggtggcgaaggyggaggggggacttggaaggctcagaggaggagctcacagtctagttggggcaatggactctgcacagatgggacagttaaggaacaata

SEQ ID NO: 908 - DNA, 179 bp, Homo sapiens
gtcaaaatttccctctagggaataacatgcctttaaaataataactaataaattcaattctgctacattgaagttttgactaaaggttcrtgtagcccaacttgcataccagaaagaggtcctgtttctgtcagaccttttctgccttggactgaggcatttttcaagacctgctttga

SEQ ID NO: 909 - DNA, 179 bp, Homo sapiens
ttgggaggctgaggcaggaggatcacttgagcccaagaatttgaaaccagcctgggcaatatagaccaagaccctgtctctaccaaaaaraaaagaaaagaaaagaaaaatagccgggtgtgatggagtgcacctgtggtcctaactactcagaaggctgaagtgggaggatcgcttga

SEQ ID NO: 910 - DNA, 179 bp, Homo sapiens
ttgcaaagcatcctttaaatgcagggtcaaaggctgggaaaaggtggagttactccaggtgacagtgcttatagagcactatccagagcrtagagaagggagttttggccaacaggcttggaatatttattagcatcccataagacgggcaaggcaatccctactgtggagatggctga

SEQ ID NO: 911 - DNA, 179 bp, Homo sapiens
taataaatgctagtgactaaaagagcttctagatggagaagatgaaggtataagagaaagaaaaacataaaaaatgatcagcaaagcaaytgcaggatgccagtaagcccaagaatggagtgggatacatcttactgaaagaggtgtcatctgtctaaaacaattcactttgaaagaca

SEQ ID NO: 912 - DNA, 179 bp, Homo sapiens
tgggtcaaagggcatgaaagtttaaaagtcttgatacatatggacaaaatactttccaaaaatatgccggctgacggtcccacctagggkgggagggagatgacagcctgctcagctcaactcacataaaaccctgcttagcccaattcctgacatctgagattaaacgaggtggccca

SEQ ID NO: 913 - DNA, 179 bp, Homo sapiens
tgtttctttatcgttatttttccttcttaccaatatatcttggagaacgttccctatgagcacacccaggtccacaattattcttttcartagctgcagagaattgcattatgtggctataccatcattcatttaactagcttgccattgatatacttttaggttatttctggatattt

SEQ ID NO: 914 - DNA, 179 bp, Homo sapiens
aggtatgcgtggtgtgtggttatttctttgaagacaggctgcttcagtctgagaaagtgcttcttgtaaatatacatagagaagcgtagygtaaatatgcttgactttagccttgaaaagaataattaggaaaacaacaaacccaaatcatcaatattaactaaaggaaattgtcagag

SEQ ID NO: 915 - DNA, 179 bp, Homo sapiens
tggtactacagacatgcgccaccacgcctggctaattttgtttattttttatagagacaaggtttcaccttgttgcccaggctggtcttyaactcctgggctcaagcaatctgcctgtctcagcctccaaaagtgctaggattacaggtgtgagccacctcacctggcctgtattagtc

SEQ ID NO: 916 - DNA, 179 bp, Homo sapiens
attttttgtatttttagtagagacggggtttcactgtgttagccaggatggtcttgatctcctgacctcgtgatctgcccgcctcggccycccaaagtgctgggattacaggcgtgagccaccgcgcccggccttgatttttttttttttaagggatgagtttttttgttcttgtttaa

SEQ ID NO: 917 - DNA, 179 bp, Homo sapiens
ttcttgacctcgttttgaggaggggtaggaggaggttctcctgtgcattgcaggatgtttagtctttacccaccagatgctaatagtacycctccagtttgttgatttttaatttttttaaaagagctggagcctccctgtgttgcccagccgggagtgcagttgctgttcacaggcgt

SEQ ID NO: 918 - DNA, 179 bp, Homo sapiens
atctttccagatctttttaatgcacagtcttccttgaatgcagccattaatggctcttccccactgaactccaggccttcagaatggggrtagggtgacagcccccactctgtcctggagtcaccgaattcctgccttggaaacacctggtgcagggattctctctccttttccgggcg

SEQ ID NO: 919 - DNA, 179 bp, Homo sapiens
ggccacccagccggtaagccccacactctcatccacaacactgcctgtggttgctggttggtttcctgctgttgttcacccagctcagcrcctggcacaatgagaggctctgtaagcctttgttgagtgaatgaatgctgcccattgtcctgcatctacggagctgttttccttgctat

SEQ ID NO: 920 - DNA, 179 bp, Homo sapiens
tgagtagctggattacaggtgcccaccaccacagtcagctaacttttgtatttttagtagagatgaggtttcaccaagatggccaggccrgtctcgaactcctgacctcaggtgatccacccacctgggccttgcaaagtgctgggattacaggcgtaagccagtgcacctggcctaat

SEQ ID NO: 921 - DNA, 179 bp, Homo sapiens
gtagaatttggctgtaatctgtctggtcctgggcttttcttgcttggtaggctatttattactgcctcaatttgagaacttgttattggyagattcaacgttttcctggttcagtcttgggaggtcatatgtgtccaggaattcatccatttcttctagattttctagtttatttgcat

SEQ ID NO: 922 - DNA, 179 bp, Homo sapiens
ttaggaatatgttcaatgcaaagtaaaaaaatatgaattgtccccaatcccggtcatgcttttgccactttggcttctcctgtgaccccmccttgacggtggggcgtagacttgacaacatcccacagtggcacggagagaaggcccataccttctggttgcttcagacctgacaccgt

SEQ ID NO: 923 - DNA, 179 bp, Homo sapiens
ggagaggaattggcagggagcaatacgaggcttcagggacctggcccctccttccccgaagcatccgcatcttcctgtaagcagttgcakaacttcagagttaagtctatgggtatcggcgtttgcgtttaacactggctccagcacttacttgctacgtgactacggggaagttactc

SEQ ID NO: 924 - DNA, 179 bp, Homo sapiens
tcagtagctgcagagaattgcattatgtggctataccatcattcatttaactagcttgccattgatatacttttaggttatttctggatmtttgctattacaattgatgctgtatttaaaaattctttgcatatatttttggaggactcctatgagtatttctgtaggataaattcctg

SEQ ID NO: 925 - DNA, 179 bp, Homo sapiens
gcacttgtatcccagctacttgggagcctaaggcaggagaatcgcttgaacccatgaggtggaggttatagtgagcagagatggtgccaytgcactccaacttggacaacagaatgagactctgtctcaaaataaaaaagaagaagaatatcacaggctccaaagtggattctaaaaga

SEQ ID NO: 926 - DNA, 179 bp, Homo sapiens
gaaataccggaaactgggtaatttacaaaggaaagagatttaattgactcacagttccatatggctggggaggcctcaggagacttacartcatggcggaaggtgaggggaagcaaggaccttcttcacatggcagcaggggaggaaagtatataagcacaggaaaaactgccatttat

SEQ ID NO: 927 - DNA, 179 bp, Homo sapiens
tttctgtgggattgcccacctgcctaagctccttgagctattttggagtcagtagctggaggcagggaggctcaggtcctagcttgcacrtcagctcacactgcagggccctagaatggagagtttgttgcttcaggatttaacaagctgtgaagagctttcaagcatctgtaaggaat

SEQ ID NO: 928 - DNA, 179 bp, Homo sapiens
gtggaggttgcagtgatctgagactatgccactgcactccagcctgggtgacagagtgagactccatctcaaaaaaaaaaaaaaaaaaaraaaagaaaaaaaaagtggtaaatgctacacacaagcttatgcgaaattatgacagctatcacttgctgggcctgagttttcttggctac

SEQ ID NO: 929 - DNA, 179 bp, Homo sapiens
tttttagtagagacggggtttcaccatgttgatcaggctggtctcgaactcctgacctcaggtgatccacctgcctcggcctcccaaagygctgggattataggcgtgagccaccgagcccggcctattaatgctttcttataaatgaggcacatgtgtatcttttgttggagtttcag

SEQ ID NO: 930 - DNA, 179 bp, Homo sapiens
tgatttctaatgtgcacatttcttggttatgactctgtaaactctttatagtctaattctctttgttctgcagatttttttttttttttyacagagtatcactgtctcgcccaggctggagtgcagcagcgtcatctcggctcattgcaatctctgtttcccgcgttcaggcaattctc

SEQ ID NO: 931 - DNA, 179 bp, Homo sapiens
tgagaatcactgtttgagcccagttccctcaagatgcagacaaggagtttgaggatcagattttggctgaattacggtgatgaaatagawcattcattcgctcattcattctaggtcctggggatctggcagtgagcaaagcagtggatgtccacactcatgaagctgatattctcttg

SEQ ID NO: 932 - DNA, 179 bp, Homo sapiens
cccatgttgcccctcccttccgccatgtcacagtgccagctagctcagtccatgttgcatctgggcaagaagccccatggccctcctgcygccagcccagtagccctttctgcccccaggatccacccctccaccctgcctggccctggcatctgtctgcaacctggtgggcaccagct

SEQ ID NO: 933 - DNA, 179 bp, Homo sapiens
agggctgactgtatgttcaagtaactgggaattcaggctgggctttgtggctcccacctgtaatcccagcactttgcgaggctgaggcgrgcggatcacctgaagtcaggagttcaagaccagcctggccaacatggtgaaaccccgtctctactaaaaatacaaacattagccgggtg

SEQ ID NO: 934 - DNA, 179 bp, Homo sapiens
gtaaaattataatgtattatagcaaaaaattaacataattcaaattttgtgtgccagatgccatgaacatgttctttttttttttttttytggtctctaattcttacagcagccctgtgaggtatgaatccttgttctattttacagaggaggacatgaaggctcaggttgcccaagaa

SEQ ID NO: 935 - DNA, 179 bp, Homo sapiens
ggtgcacgcttgtaatcccagccgcttggaaggctgaggcacaagaatcacttgagcctggaaggtcaaggctgcagtgagctgtgatgrcgccactgcactccagcctgagtgaagggcaagaccctgtctcaaacaaacaaacaaaaatcaaaggatgaagtcacgtagattttggg

SEQ ID NO: 936 - DNA, 179 bp, Homo sapiens
ctcgaactcctgaccttgtgatccacctgccttggcctcccaaagtgctgggattacaggtgtgaaccaccacgcctggcccaccatgarggcttaaagagtgaaatgttatctgcgagtcttagtacagttctctctaaatcgacagcagggattgcttgggggactttttgccttta

SEQ ID NO: 937 - DNA, 179 bp, Homo sapiens
cagagtctagggccaggtggaatgtgtcatcttgtgaggaaatgtgtttgtgttgttttttacttaaaaattgtcagcgtagtggagagrggaatgacagaagtaggaaggcaccccaccattgtgtagtgaggcagtatacagagaggtaaggcagccggggcagatggctgcggccc

SEQ ID NO: 938 - DNA, 179 bp, Homo sapiens
ctttatttttgggaggccatgtggccagctaaaaattggaggttcgattacaaaggaagaaggggagaatgggtattggggacaaccagyagtctctgttgcaacaaccataatcaatggcatgaggatcctggagaaactctgcccctgcctgagaccaaaaccatgacttcctaatc

SEQ ID NO: 939 - DNA, 179 bp, Homo sapiens
tgaacccaggaggcagaggttacggtgagctgagatcgcaccattgcactctagcctgggcaacaagagtgaaactccgtctcaaaaaaraaaaaaaaaaaaatcaactcaaaatggatcaaagatctaaatggaagacctgaaactataaaacaactagaagaaaacataggggaaac

SEQ ID NO: 940 - DNA, 179 bp, Homo sapiens
gagctgtgaaagacacagaacagtacagggtgtggtccctgccctcgagaggtttacagtctaggtggagaaacgggaaccaggacacayggggagccgagagaaaacagtccaggccagtatgttacaggagctggaaggtgtttggggtcagaccccaatactccaagtacactaag

SEQ ID NO: 941 - DNA, 179 bp, Homo sapiens
attaggcattagattctcataaggagtgcacaacctagatccctcccatgcacagttcacaataaggttcacgctcctataagaatctartgctgccactgatctgacaggacgcggagctcaggcggtaatgtgagtgatggggagccgctgtaaatacagaagaagcttcacctgct

SEQ ID NO: 942 - DNA, 179 bp, Homo sapiens
cctgaccttgtgatttgcccgcctcagcctcccaaagtgctgggattacaggcgtgagccaccgtgcccagcgataatacatattttttwaaaaaaaactttattgaggggtaatttacatacactaaatagcactcattttaagcacgcagtttgatgtgttttgacaaacgtacagg

SEQ ID NO: 943 - DNA, 179 bp, Homo sapiens
aggtcactcacccctaaagggagaggcaccatgcgaggccccttcctatcctatgtgcggagactcacagggtccttcctggtcctgggmtcgggaccgtgagagacgcagttggttccgagttcaggactaggggtccccttagatcctcagatcctgcagaatcccggctctgcccc

SEQ ID NO: 944 - DNA, 179 bp, Homo sapiens
taattcaagatgagatttgggtgaggacataaaacttaactatatcacggcccttatctattgcatatatttcatacacacacatacacytttttcttcataaaaagcacactatcctcactgttctgcaccttacttttttcatatgacacaatatcttgaaggtcattccatatcac

SEQ ID NO: 945 - DNA, 179 bp, Homo sapiens
gagataaggtggaggggccggctcccggcgcgcgcgcgcgtgcgtgtctgcgcgggcgtgtgtgtgtgtgtgtgtgtgtgtgtgtgtgtstgtgtctgtgtcagagacggcacaagagcgcgcggtttcccaacagcggcgggagtttcggaagcctggccggctcagcgtgacgtgtt

SEQ ID NO: 946 - DNA, 179 bp, Homo sapiens
ctacttgggaggctgaggtgggggaatcacttgagcccagacagttgaggctgttgtgagtggcgatcatgccaatgtactccagcctgygcaacagagagagatcctgtctcaaaaaacaaacaaacaaattcagtgcctggcacatgttgtatattcaatttgtgatgatggtaaga

SEQ ID NO: 947 - DNA, 179 bp, Homo sapiens
ctcagtttcctcatctgtcaaatgggatcaattgtatctgcatggaacctggcttttatgtgcctcaaatagaattcacctttatcaatrtcatcaccactgttgtcattgctacctttacctggtagtcactgataccaagcgcactcctaagtggctttatgtggatcatatattca

SEQ ID NO: 948 - DNA, 179 bp, Homo sapiens
taccgggcccccaaacgacaggggctgtctgctctactgcctctcccaggaatcacaccctgcctacctgcctcattaattccctggccyacaggacagagatgttggtgcctgccaggtccctgggccccagagaaagagccattagcaactataggacctgtttcccatccttatcc

SEQ ID NO: 949 - DNA, 179 bp, Homo sapiens
cgttcaaagcatgccacactccctctctccctcaccttggcctccctaacccaggcttgtcctagtgaaatcacttgcaaagcctgctarccctttcaacttgctgtgttttctccatcaaacacaattttcatcaaacatcccccaggagcaccttaaatgacttccttttgcctagg

SEQ ID NO: 950 - DNA, 179 bp, Homo sapiens
tgcacatttatggatataaaacactttggagagagagagagagagagagagagagagagatagagagagagagagagagagagagagagwgtgtgtgtgtgtgtgtgtgtgtgtgtgtgctgttacctctatttggaacaaatgggatccaaatgcttccatttttaggaaatttatga

SEQ ID NO: 951 - DNA, 179 bp, Homo sapiens
acatcccccacccacctgctggcacacacagacatccacatcagcctcacccattcacacgtggggacctcagcatttcagcagacacaytttgtcaatcccaggtcaagccatcctcaaggcagggctgtctgcacccactgagacctccagcagcatccccccatcccccctccacc

SEQ ID NO: 952 - DNA, 179 bp, Homo sapiens
gcctcagcctcctgagtagctgggactgtagggatgtgccagcatggctgggatcttgttttaatttgcatttactttatttcaagtagrgttgagcacatattcatattttaattagccatccaggtttttattatgaattcctattcagatcctttgtccattagtattttttaagt

SEQ ID NO: 953 - DNA, 179 bp, Homo sapiens
tcgaggcatatcagaggcctttggaacattactcttcccaggaaccagattctgctgggaagaaagcccatgcttgcaaatagaaatagygagggagaccaggccaacagcgccctgccaagcagagcacagagggaccgctctaacaccgagcaacatgtgattaacaggttacacta

SEQ ID NO: 954 - DNA, 179 bp, Homo sapiens
tccttcaggctcagccaggaccctcagcacagctcttattctctcctgctgttgtctgcattgccaggggactgtcttggctacccccaycctgtcaggctcacacaccagggcctggtgacaggggcagcctcgacctcccagactcaagtgaccctcccacctcagcctctcaagta

SEQ ID NO: 955 - DNA, 179 bp, Homo sapiens
ttattttttcccttcactagttatttcatgcttatggctataatacatctcacttggcattggttttacctagaaaggggaaggataggygggcatagtggctcatgcctgtaatcccagcactttgggaggccaaggcagacagattgcttgagctcaggagttccagaccagcctgg

SEQ ID NO: 956 - DNA, 179 bp, Homo sapiens
aattttaaagaatgtagtatagtcacacaatgcaatactgtatagcaagggaaaagaataaagataccaatttggatgcatctcaggaawaaaaaaaaaaaaaaagaacaaaccaaagaaagagagagaaagaaaaaagagagaaaaagaaaacagaaagaaggaaacagtgagagaga

SEQ ID NO: 957 - DNA, 179 bp, Homo sapiens
aaactgaggtcagagtcttaaagagttcacttattggacaaagcactggagactaggctttttaggcagaggaaattgtgtatgcaaaascaaaaagatgtgaaatagtatgacagtgtagaatgtgaagaaggattgatgggaaatgaaactgaacaggtaggcagtgaccagatcat

SEQ ID NO: 958 - DNA, 179 bp, Homo sapiens
tctggtcacgctgtcacctaagtaagaacctggccaaaagtgaggaatttttttttaaacaaaatcatgggaggccattattttggactragctcatgcactaggcaccaacaaaccaaaccaaactaaaatggagtcactcatgctaaatgtgacataatcaaaccaaggctttaaaa

SEQ ID NO: 959 - DNA, 179 bp, Homo sapiens
acgtgtacatttgtggattgactgaaggatgtccttgctgtctctgagggaccaggcctggcctagaagggacacagactgtttttaggktgtgctgtcaggccgtgggggtgctgtcagggatctgaatgtgaaggcacgaggggtgagtgcaccatcccacctgatggtgacaagtg

SEQ ID NO: 960 - DNA, 179 bp, Homo sapiens
cgtgtacatttgtggattgactgaaggatgtccttgctgtctctgagggaccaggcctggcctagaagggacacagactgtttttaggtkgtgctgtcaggccgtgggggtgctgtcagggatctgaatgtgaaggcacgaggggtgagtgcaccatcccacctgatggtgacaagtga

SEQ ID NO: 961 - DNA, 179 bp, Homo sapiens
tggggcaggcgaggtgtctggaaggtgctattttcttaaaaaatgccaggggactgctggaaatgggctgtggaggtgtagcttggctargaactcccagaaaggaaagtcaggaatgccacatgtcctaggatgtggctgcagggaatttcttccaggattctaacatcctacacctg

SEQ ID NO: 962 - DNA, 179 bp, Homo sapiens
aggcctctatttcagcatgaggagaaggaaaatttacaacaaaaacgagcaaaaggctctctattctgggaaggtgacaagtgctaagasaaagtgaagctggaaagggaggtgggccatgctggggaatgggaactgatgtttcaactttaattatcttgcttaatcctcgcagcatc

SEQ ID NO: 963 - DNA, 179 bp, Homo sapiens
tgacactcacatcacagtggactttgcttctggaggcttctgcacagggaatcttatcttgctcccttggccgtgttagctccattgccrgaagtacatgagacattgggcgtcaccacaggagccaagcctgtcaacgcccaccccgttccaaagcccttgtcccactcagggctact

SEQ ID NO: 964 - DNA, 179 bp, Homo sapiens
tgagacattgggcgtcaccacaggagccaagcctgtcaacgcccaccccgttccaaagcccttgtcccactcagggctactccactgggygtttgtcatccccagaggggccttctgcccagggaagagccacctctgtagccttggggaagtccatcccatgaccaaccagaagagca

SEQ ID NO: 965 - DNA, 179 bp, Homo sapiens
cccaggaggcggagcttgcagtgagccaagattgtgccactgcactccggcctgggcaaaagagcaagactccatctcaaaaaataaatwaattaaataaataaataaataaagttagtatgtatttacacttaaaaaaaaggtcattatataatgataaacggatcaattcaacaaga

SEQ ID NO: 966 - DNA, 179 bp, Homo sapiens
gcatgccatttctactgcctgggaagagccccacctccctttggaaagaattccaatctctcctcagtgaggtgggttccagtagaatamccccaaccccactaccacttcccaacaggtctacggctgtctatgtacagtccacgagggggcgcccctcaccccacgcccccgacgcc

SEQ ID NO: 967 - DNA, 179 bp, Homo sapiens
cccagccctttgggaggccagggtaggcagatcacgaggtcaggagatcgagaccatcctggctaacatggtgaaaccccgtctctactwaaaatacaaaaaattagccgggcgtggtggcgggtgcctgtggtcccagctacttgggaggctgaggcaggagaatggcgtgaaccccg

SEQ ID NO: 968 - DNA, 179 bp, Homo sapiens
tgccaaggtcgtgcagtcactcagccctggagtcaagccagagcaggcaggtaggtgccagggctccctcatgggcaaactcactctccrttttccctctcctgaagggggaggagaggagccaggtagaccagccacctttaattttctttttgcctgcaaaacggtttccttggaca

SEQ ID NO: 969 - DNA, 179 bp, Homo sapiens
tgaattggaactagagttgcagcctgggaggggagatgcatgtggatgaacaatcctaacgggaaacgacgagaagggaagtatggatgraagaaaatgggagttcaggggagggaaagtcgcagccagaaggccacattcaactaaggcattttgacaggtcatttggatttttttaa

SEQ ID NO: 970 - DNA, 179 bp, Homo sapiens
tgggcagtgtggagttcctcccagaactccacctcctgcgaacctgagttgcctgaggccacaacagagctgagctgagacggggaggcytgggggccactcccgtaccgggcccccaaacgacaggggctgtctgctctactgcctctcccaggaatcacaccctgcctacctgcctc

SEQ ID NO: 971 - DNA, 179 bp, Homo sapiens
gtgacaagcttttttttttttttttgacacagggcctcactctgtcacccaggctggagtgcagtggtgcaatcatggcttattccagcytcaacatcctggtctcaagcaatcctcctgactcagcttcctcatagctggggctacaggcacacataccacgcctgactaatttttat

SEQ ID NO: 972 - DNA, 179 bp, Homo sapiens
tggaggattagtgtttccattaagaaaagaggtgcagtgggaggaatgagttgaaggggaaaacagtaagttgggttatagacacattayatacagggagctatgggaaacttggatcaccgtgtctggtaggcaggtagataaatgggtcttgaaccctagagagagttgtagactgg

SEQ ID NO: 973 - DNA, 179 bp, Homo sapiens
caggtcctggcccagctggatgttctcactctctttgatcacgtcaggagtgatctggaatgtagcgttcttcatggctgtgagtggatrgggagggaagggtagttggggttggcctgactccaggggtccatgtcccaccccaacccagacccagcttctcccctctagctggccct

SEQ ID NO: 974 - DNA, 179 bp, Homo sapiens
tccatgttatatgagagctaagaattgaaaatggaatgcacatccagtattagggggatggtaaggtaaacaatgaagtcccaagtaaaytgaatattatgtagacttttaaagtggtaattttggccaggtgtggtggcgcatgcctataatctcagaactttgggaggctgggatgg

SEQ ID NO: 975 - DNA, 179 bp, Homo sapiens
tgaggttggggctctggaagacaggagggcatcgaggcatatcagaggcctttggaacattactcttcccaggaaccagattctgctggraagaaagcccatgcttgcaaatagaaatagcgagggagaccaggccaacagcgccctgccaagcagagcacagagggaccgctctaaca

SEQ ID NO: 976 - DNA, 179 bp, Homo sapiens
ttgcaatgatatatttatttgtgagactatctgaaacgtgtttgcctttcctcctaagctctatgagggcagagcctgttttgcccaccrctctaccccaggacctagcacagtgcctggcatattaacagggactcaataaaagcacgtggcatgaacaagtggtggcctcctcactc

SEQ ID NO: 977 - DNA, 179 bp, Homo sapiens
tcttaaaataggagaacttagaaggcagcacgttaattagagaccagagataaaattaaaatttgattgggaattttaagcaaagctttyaaaacctttttactctgaagctatttcttatgtaggtggggacatggtgtgggaatgtgctaattcaacagtgaggttcagtgtcacgc

SEQ ID NO: 978 - DNA, 179 bp, Homo sapiens
accaacaaaggactaatatccagaatctacaaggaactccaacaatacaacaataaaaaaaaaataaccccatttaaatgtgggcaaaasacatgaacacacacttttcaaagaagacatacaaatggccaacaagcttatgaaaaaatgctcagcatcactaatcatcagagagatgc

SEQ ID NO: 979 - DNA, 179 bp, Homo sapiens
agaaatttaaaaggactttattaaagagtgctatgcttaaaagtcaggttaattaaaaaatgaatattcaggctctaatggcctggaatycatgggaaaaacaggaggcaccagaaacccttttcctggccctgttcctccaaggactccaccataaagccaataaccaattaagaaac

SEQ ID NO: 980 - DNA, 179 bp, Homo sapiens
gaacccaggaggcggagcttgcagtgagcagagatgtctccactgcactccagcctaggtgacagagcgagactccatctcaaaaaaaawaagaaagaaagaaactcctaccaagttctcaggacagcaaatggcgaaataaaaacttcaccctttgaacatactgaaatttcaaaaca

SEQ ID NO: 981 - DNA, 179 bp, Homo sapiens
tagattaaagctacatttatataaaccaggctgggggcacacctgagaactctgctcatcctcaaaagagacagttaagatgggggtcawgttccctctgctctaagtccttttgggaatggctgtgtcacatgaatagagatgatctgggctctaacctcgcctctcagaacacagca

SEQ ID NO: 982 - DNA, 179 bp, Homo sapiens
ccattcttgttcatcagttcagcttgacccatcaccctagctgtggaaacttctccacgatgagcctttatatctacatttgcttaaagycactccgtctaccattacggctgaggaaaacagtgaagatgctttctgtggactgacaaggaataatcaccaagatgatgtacaattca

SEQ ID NO: 983 - DNA, 179 bp, Homo sapiens
gtgtgtgtgtgtacttagatgcagcttttctcagatttactactccagcttcttggatctgtcagaagacaagagagaagaaagagtgcrcgcaccaactattaactcactatccttggttgagcaaattcttataacaagggagaatgtgtctaagctcggggcagactttttacctg

SEQ ID NO: 984 - DNA, 179 bp, Homo sapiens
gttcattggtgctcctgttttagttacttctccatagacttgtttttcccttgactaatcaatgccatctggtgccaggtggtatcctgrgtgtagcacagtgacagggtggagactgccctggccgtggcatgtgcagggggcgttcttgagcctgtcttctgggagccctttctttt

SEQ ID NO: 985 - DNA, 179 bp, Homo sapiens
aggttgcagtgggccaagatcacaccactgcactgcagcctggtgacagagtgagactccatctcaaaaaaaaaaaaaaaaaaaaaaggraagaaagaaagagaaagaaaataaagaaagaaaaagggaaggagggagggagaaggggaagtccaagacaggtgtgaaaacccgagaag

SEQ ID NO: 986 - DNA, 179 bp, Homo sapiens
aagaatttgaatgaactgaaaacttcctgtttcattagattaaaaacctgtactttgctcagccaataactgggacacagtatcaagagwttttcatgccatttctgggtgtggaagatggcctgggaaatgaagttgaaacccccaaattcaggaagttacttgggggcagcagcagc

SEQ ID NO: 987 - DNA, 179 bp, Homo sapiens
catcccagaggtgtgggagtggcagcctcagtggtggcgactgtccagcctggccgtgacagggcctcaggaggcctgtggggcctggcrggggtctaagagtataggctgatggatgcgctgagattcaagggagatgggaagacccttagggacctgacagcccatcccctctattt

SEQ ID NO: 988 - DNA, 179 bp, Homo sapiens
cgccactgcactccagcctgggcgacagagcaaggccttgtctcaaaaaaacaaaaaaaacaaacagaaaaaaaccacactatgttgctkctgtccttggctttttggaggctctaacagatgaatatgttataggctaatgtaaggtcaaggcatacagttttatgaaaaggcaggtg

SEQ ID NO: 989 - DNA, 179 bp, Homo sapiens
agctaggttgtaaaaatcttcttcttttttttttttttcccttgagacggagtctccctctgtcacccaggctggagtgcagcagtgcartctcagctcactgcaacctctgcctcccaggttcaagtgattctcctgccttagccttccaagtagctgggacaacagatgtgcaccat

SEQ ID NO: 990 - DNA, 179 bp, Homo sapiens
tggaaaaatctgactcagaaggggccaggtcttgggtttccttctttcctgtctggtcaaactcatcctggaatttgaagtttagaaaaycataatttaataagacaaacatagacttaatccccaaacccaggaacagtagcatgaggacagctgggagtgttaaggagtttaagaac

SEQ ID NO: 991 - DNA, 179 bp, Homo sapiens
gcgtgctccaccacgccgggctagctttttttttttttgtatttttagtagagatggggtttcaccatattgcccaggctggtctcgaamtcctgacctcgtgatccacccgcctcagcctcccaaagtgctgggattacaggtgtgagccaccgcacctggcctcccggctaactttt

SEQ ID NO: 992 - DNA, 179 bp, Homo sapiens
tatgatcatgccactacactccatgcattccagcccgggtgacagagtgagatcctgaaaaaaaaaaaaaaaaaaaggaaggaaagaagraaatgttcgcaaagtatgcaccaacaaaggactaatatccagaatctacaaggaactccaacaatacaacaataaaaaaaaaataaccc

SEQ ID NO: 993 - DNA, 179 bp, Homo sapiens
tggtggcgggtgcctgtggtcccagctacttgggaggctgaggcaggagaatggcgtgaaccccggaggcggagcttgcagtgagctgaratcgtgccactgcactccagcctgggtgacagagcaagactccgtctcaaaaacaaaaaaaaaaaatctgaactctagatgtgctcaat

SEQ ID NO: 994 - DNA, 179 bp, Homo sapiens
aactattaacgaaatcaggcaaagccccacccttctctttctcgaagtgagtttctggcagtttccccatctaatgagactgctgcgggrgaatagaagaaagtatctctgaataaagacagatcgtgctcctgttggatgcaagagattaagagttttagggggagggtgaaaggtca

SEQ ID NO: 995 - DNA, 179 bp, Homo sapiens
tgcctgccttggcctcccaaagtgctgggattacaggcatgagccatcacacctggcctacaagtggttttaattccagatactacaaastataattattcaagcctacccacagctgtgagtattgaaattctcacatttccagtcatctagataagtaaaggtcattttgtttattc

SEQ ID NO: 996 - DNA, 179 bp, Homo sapiens
tgcttcagctttagccattgggagctctttcaggttggttcctgagtcctttcaatgagctcccgtccttttttgagcactttatctctrctaccataagctactctgggttccttgtgtgttttcccttcccagcactgaaatcaaccacttctccaagaaaccttggtccttttatt

SEQ ID NO: 997 - DNA, 179 bp, Homo sapiens
acctgtacttggcctcccgtcccacaaactggaccatgcagcgcattgagatgactgaggaaaaaaaagaaaacacacacaggtgatgtsgtgggccacacttcataatgctccagccaccgggtgccaggtgcagagtggccactgaacaacgtggcctattcagagagcaggagagg

SEQ ID NO: 998 - DNA, 179 bp, Homo sapiens
gactgtaaactagttcaaccattgtggaagacagtgtggcgatttctcaaggatctagaactagaaataccatttgacccagccatcccrttactgggtatatacccaaaggattataaatcatgctgctataaagacacatgcacacgtatgtttattgtggcactattcacaatagc

SEQ ID NO: 999 - DNA, 179 bp, Homo sapiens
gcggtggctcatgcctgtaatctcagcattttgggaggccgaggcgggtggatcacaaagtcaggagattcaaaccatcctggccaacayggtgaaaccccatctctactaaaaatacaaaaattagctgggcatggtggcatgcacctgtagtcccagctgctcgggaggctgaagca

SEQ ID NO: 1000 - DNA, 179 bp, Homo sapiens
cctgggcttaagcccaaatagccaaagtaatcctaagcaaaaagaacaaagctggaagtatcatattatttgacttcaaattatactacmaggctatggtaaccaaaacagcatggtgctggtataataataggcacatagatcaatggaacagaaaaaagaacccagaaaaaaagcca

SEQ ID NO: 1001 - DNA, 179 bp, Homo sapiens
acacgtatgtttattgtggcactattcacaatagcaaagacttggaaccaacccaaatgtccatcaatgatagactggattaagaaaatrtggcacatatacaccatggaatactgtgcagccataaaaaaggatgagttcatgtccttttgtagggacatggatgaagctggaaacca

SEQ ID NO: 1002 - DNA, 179 bp, Homo sapiens
acgatacaacaatcctaaatatatatgcacccaacattggagcaccaagattcatcgaacaagtactacttgacctaagaaaagagatakacaggaatacaataatagtgggggacttcagcacccccactgacacactaggcagatcatcgagaaagaaaatctacaaagaagcactg

SEQ ID NO: 1003 - DNA, 179 bp, Homo sapiens
gtcttgcttgttgtccaggctggagtgcagtggcacattcttggttcactgcagcctcgacctcctgggcttaagcccaaatagccaaaktaatcctaagcaaaaagaacaaagctggaagtatcatattatttgacttcaaattatactaccaggctatggtaaccaaaacagcatgg

SEQ ID NO: 1004 - DNA, 179 bp, Homo sapiens
ctcaattaaactcctttatacttaattcggcttaagtttttcttttatcaacagagtaagctctcactaatgagtgggctgagtgaaaaytggagggatttgttcgtctttctcaagagtagtagcttccagaaggaaggggctgctcttcatttacatttcccttccactcccatccc

SEQ ID NO: 1005 - DNA, 179 bp, Homo sapiens
ttcctaggcatctgttagacacactcacattcatgaactcctttaatcctcacagcaaccctatcagcgccaagctgcaggtggaaaacrgaggctctgggagctgcaacagctctgttccacagggcaaccgaattctctcccttgtctgaactccagtggcatccagatcctcagca

SEQ ID NO: 1006 - DNA, 179 bp, Homo sapiens
gaggctgaggcgggaggataatttgagtcttgaagtttgaggctacagtgagctatgatcatgccactacactccatgcattccagcccrggtgacagagtgagatcctgaaaaaaaaaaaaaaaaaaaggaaggaaagaaggaaatgttcgcaaagtatgcaccaacaaaggactaat

SEQ ID NO: 1007 - DNA, 179 bp, Homo sapiens
ttttttatttttagtagagatggggtttcaccatcttggctagtctggtcttgaactcctgacctcgagatccacccacctcggcttccyaaagtgctgggaatacaggtgtgagccactgcgtccagactattttttttttttaagagatagggtcttgcttgttgtccaggctggag

SEQ ID NO: 1008 - DNA, 179 bp, Homo sapiens
cctccgctgggcacagaggcttttcagaaggggacactggaggaggggtggtctgaaggacaccctcccgctgcatggccaaccagaacrtaaaacttactgatcaggagctgggtgcagtggctcaagtctgtaatctcagcactttgggaggctgaggtaggtggatcacctgatgt

SEQ ID NO: 1009 - DNA, 179 bp, Homo sapiens
tagcggggtgtggtgacatgctacttgggaggctgaggcaggagaatgacttgaacccaggaggtggaggctgcagtgaaccaagattgygccatcgcactccagcccgggcaacagagtcagactccgtctcagaaaaaaaaaaaaaaatgagcaaaaagtcaaataccacatgttct

SEQ ID NO: 1010 - DNA, 179 bp, Homo sapiens
cacgtggacacagagagtggaataacagacgctggagacttggaaaggtaggaggatgggaggagggtgaaggatgagaaattacctaakggttataatgcacactatttgggcaatggtcaggcttaaagcccagctgttcaatatatccctgcaacaaatatgagcttgtgccccct

SEQ ID NO: 1011 - DNA, 179 bp, Homo sapiens
gtggacacagagagtggaataacagacgctggagacttggaaaggtaggaggatgggaggagggtgaaggatgagaaattacctaagggktataatgcacactatttgggcaatggtcaggcttaaagcccagctgttcaatatatccctgcaacaaatatgagcttgtgccccctaaa

SEQ ID NO: 1012 - DNA, 179 bp, Homo sapiens
tgaaagagagagcaagataaatgaatctctgtcagctagtgacactgaagaggtctggtcttggattcagaaatcagggttcgaaaactrgctcttgccactgagcctcaggaccttgaataagttgcttaacctcagtgggcttaagtttcccatctataagaaggaataactgggct

SEQ ID NO: 1013 - DNA, 179 bp, Homo sapiens
agttgcttaacctcagtgggcttaagtttcccatctataagaaggaataactgggctaagtgatccttaagattcctttcagcttgggarcatgaatctgattacattgttcacttgcttaaagcattttctttttttttttagacggagtctcgctgtgacacccaggctggagtgca

SEQ ID NO: 1014 - DNA, 179 bp, Homo sapiens
tatttatttatttatttatttatttatttatttatttttgagatggaatctcgctctgtcacccaggctggagtgcagtggtgtgatctyggctcactgcaacctctgcctcccaggttcaaacaattctcctatctcagctttccgagtagctgggattacaggtgcccgccatcacg

SEQ ID NO: 1015 - DNA, 179 bp, Homo sapiens
tacagaatgggagaaaatatttgcaggccgagcgtagtggcttatgcctataatcccagaactttgggaggctgaggtgggatgattgcytgagcccaggagttcaagactagcctggccaacatggtaagaccccatttctacaaaatagtaaaataaaaaaattagccaggtatgct

SEQ ID NO: 1016 - DNA, 179 bp, Homo sapiens
cttctctgatctcatttgctgccactcgggtctagcaaactggtatccttgcttttctttcaacacttgagggccagttcctgccttagkgcctttgcttgtgatgttgcccctgcctggaacattcttccctccctcaaggaagtccctgaccaccccatgtaaaatagctctctgtt

SEQ ID NO: 1017 - DNA, 179 bp, Homo sapiens
taccccactacaggccccagtgtgtgatgttgcccttcctgtgtccaagtgttctcattattcaattcccacctatgagtgagaacatayggtgtttggttttctgtccttgcgatagtttgctcaaaatgatggtttccagcttcatccatgtccctataaaggacatgaactcatcc

SEQ ID NO: 1018 - DNA, 179 bp, Homo sapiens
cagagtgagactccgtctcaaaaaaaaaaaaagaatcagaccgttgtagggagtattttgccttcacataccagacatgagacatgagarcagccttcctcctaggcttctgagaagagggcctgcttagcccaaagagagctgacaccacaaaaagctcccctgaagtgaatccactt

SEQ ID NO: 1019 - DNA, 179 bp, Homo sapiens
gacaaatgagactttattaaatgaaaaagcttctgcacagcaaaagatataatcaacagagtgaacatacaacctacagaatgggagaamatatttgcaggccgagcgtagtggcttatgcctataatcccagaactttgggaggctgaggtgggatgattgcttgagcccaggagttc

SEQ ID NO: 1020 - DNA, 179 bp, Homo sapiens
aactttgggaggctgaggtgggatgattgcttgagcccaggagttcaagactagcctggccaacatggtaagaccccatttctacaaaawagtaaaataaaaaaattagccaggtatgctagcatgcactggtggtcccagctaccctggaggctgaggcgggaggataatttgagtct

SEQ ID NO: 1021 - DNA, 179 bp, Homo sapiens
agtcccggccatcagagtcccaatgcatccctaagctgacctcagtggcgagcaagacagccccatctcagcgtgggccacggtccctgsctggagccctttgcccactgtcccttcaccccggctggccaaggtgtcaaggaatgcattgaagagacatttcacagccttcggagtgg

SEQ ID NO: 1022 - DNA, 179 bp, Homo sapiens
cgccactaaagtcccggccatcagagtcccaatgcatccctaagctgacctcagtggcgagcaagacagccccatctcagcgtgggccayggtccctgcctggagccctttgcccactgtcccttcaccccggctggccaaggtgtcaaggaatgcattgaagagacatttcacagcct

SEQ ID NO: 1023 - DNA, 179 bp, Homo sapiens
ctttttttttttttttttttttgagactgagtcttgctgtgttgcccaggctggagtgcagtggtgcagtctcggcttgctgcaatctcygcctcccgggttcaagcaattctcctgcctcagcctcccgagtagctgggattacaagcgcccaccaccacgcccagctaatttttttg

SEQ ID NO: 1024 - DNA, 179 bp, Homo sapiens
gactaatatccagaatctacaaggaactccaacaatacaacaataaaaaaaaaataaccccatttaaatgtgggcaaaagacatgaacayacacttttcaaagaagacatacaaatggccaacaagcttatgaaaaaatgctcagcatcactaatcatcagagagatgcaaattaaaac

SEQ ID NO: 1025 - DNA, 179 bp, Homo sapiens
gagttgtgttgaacctatttcatttcaataaaattggaggacctttgattttcagccttgaactcaaagagtccagtgggagagagacayaaactacaattcaacatgttagagtaagaacgaggtttgcacagatgggtcaggaagacatctgaaacgaagtaggtgatatctgagtt

SEQ ID NO: 1026 - DNA, 179 bp, Homo sapiens
tcttttcataacccaattcaactcagtagggtttgcggcaaaatttcagaaagacaaatcattctaattcaaacattcctctgggcacgyggaataagtgagaggtggcagagggacagagaatgattaaagagttctccagtgcagagcatgctactcagatgtcaattatcagttag

SEQ ID NO: 1027 - DNA, 179 bp, Homo sapiens
ggggtccatccccagaccacggcctgatctccctggggagatggagaaaaggtggcatggcctcagggctgagtgcagagttccggagtygggatctctggcagtgattcatgcctgctctcctagtagcccaacccggccatgatggtctcagtgctgggtgagattcattgcctgag

SEQ ID NO: 1028 - DNA, 179 bp, Homo sapiens
tgtgagccactgcgtccagactattttttttttttaagagatagggtcttgcttgttgtccaggctggagtgcagtggcacattcttggytcactgcagcctcgacctcctgggcttaagcccaaatagccaaagtaatcctaagcaaaaagaacaaagctggaagtatcatattattt

SEQ ID NO: 1029 - DNA, 179 bp, Homo sapiens
cggtgaactaaggtcaaagctctttctatcatggagcagaacaataagacaagcagagaggggaggagagtgaggagaagcaaaagagarggaaagagagtgaagaagctgggaagacaagagagaaaggtgaatggtgggaggaagggtgacgggaggagcatccctgtcccctcatc

SEQ ID NO: 1030 - DNA, 179 bp, Homo sapiens
acacgaatctgtagctcttctatacaccaacagtgaccaagcagagaatcaaatcaagaactcaaccccttttacaatagctgcaaaaartaaaataaaataaaataaaataaaataaaataaaataaaatacttagaaatatacctttggatgcagtccaaagacctctacaagaaaa

SEQ ID NO: 1031 - DNA, 179 bp, Homo sapiens
atattttggcagcatcttggggaagttgttacacttgtgtagtgagttaattagacaatattcttcttagtaaaattttcattgcatttrtctattaaagaatattgtgaaattagtaacataaatccaattatgtaatccctgagaaataaattaatttctttaataaaggaatcaat

SEQ ID NO: 1032 - DNA, 179 bp, Homo sapiens
ggagaagttgaagttactggaaacttaaaaggaaaaggcgtttcatttacaatgagagggattcagtgacacatgttgaactcagagtayttttgcctgtaaacattaaattgaagccctacttctcttactttgagtttcagctctcagtgcctccagacctttggtcatgtactatt

SEQ ID NO: 1033 - DNA, 179 bp, Homo sapiens
gcttttaagcaccagtgtatctgtaagactacttctattggtctgaggactccgctttcacaaaaacttatacagcatgttatggtttcraaaatttttaaatattagcacttggacccatgttaagtacatctgttgtaaaaagatgaattctgtaacataatgatgagaaggtcata

SEQ ID NO: 1034 - DNA, 179 bp, Homo sapiens
attaacagagtctctgatgcaaatttaggtagcagtaatttaaagcccttgctataagcacctctcctttactccttctgctccctaccyctatgtgtggactcctgaataaggctcttaatatgcctactacccatacctaatgtatgaactcttggtaagggaacttcaaatgttta

SEQ ID NO: 1035 - DNA, 179 bp, Homo sapiens
tttatcagctgtatactatgtacatgccgcttggctatgtgtagaatctctaacctttacaatagtcctgcactttagggatcgatactrcaattgcataggtgaggcaactgagttttaaggagcttaagaaacttccttaaggtcacacacctggatttctaaactatatctctctc

SEQ ID NO: 1036 - DNA, 179 bp, Homo sapiens
gaatgcctgtgatgtgcttagtgcggcaacgaacataatggagtcagtaaacacttactgttctgtaaaagttgttatcctcacagttgrtgctatgaaagcaagaaataatctggaagggagttcgaactttcgtcatttgccgaacctgaggaactaagagcacaatttgaaaccca

SEQ ID NO: 1037 - DNA, 179 bp, Homo sapiens
tacttggggaagttggttcatatgcatgctttgaattaacttgtacatgaggcactgataccaaaaccaaactacaggtaaggatatagkggcaaagattgaatgacacaggctgggcattgaattcaatgcttctgtttggaggtatgactttggtctgtgaagaggtaaagggtatt

SEQ ID NO: 1038 - DNA, 179 bp, Homo sapiens
tgcctttacttgtctgcttgattggtttcatcattctcttaaaatttctccaccctttttaattcttttatttttaatttttactctctyttttttttttttttgagacggagtctcgctctgtcgcccaggctggagtgcagtggcgggatctcggctcactgcaagctccgcctccc

SEQ ID NO: 1039 - DNA, 179 bp, Homo sapiens
agaaaaaagggccacgatccagagactggaggtcctggcaggatcccagaccctaattttttcatcacagcccttacttggggaagttgrttcatatgcatgctttgaattaacttgtacatgaggcactgataccaaaaccaaactacaggtaaggatatagtggcaaagattgaatg

SEQ ID NO: 1040 - DNA, 179 bp, Homo sapiens
gtaagactacttctattggtctgaggactccgctttcacaaaaacttatacagcatgttatggtttcgaaaatttttaaatattagcacwtggacccatgttaagtacatctgttgtaaaaagatgaattctgtaacataatgatgagaaggtcataagtttaatgccttagagacata

SEQ ID NO: 1041 - DNA, 179 bp, Homo sapiens
aaaaaaaaaagataagatcaggaaaataagtttgaaccagaagtgagcttgtgcacaaattttaaactttggagacttacacaattctgkctgtaatgccatatgaaaataggaaacataatttgttagaaaattaattgtcagtaaattgaaacccatcagtgttatatgagcatggc

SEQ ID NO: 1042 - DNA, 179 bp, Homo sapiens
atgtacatacaaaagccatgttttaatctcattttttttgttgtttaagtagacgaaaaatgaatttcggagaagaggcaaactattatkgaactatatttttttctacaggttgagaagatttttttccttaggcttgagggaaactgttacaatcaaagtgtatttataatttatat

SEQ ID NO: 1043 - DNA, 179 bp, Homo sapiens
tttttcctacagttaacattgcagagctaggaagcagataagacagtcttggccaagtcaggcaagatgttttaaataaaaagataccaygagcagaattaaataatggcaaagggtcaaagtaattcccctcttcataatagctgccttactaatgagaattttcaagtatgaagtgt

SEQ ID NO: 1044 - DNA, 179 bp, Homo sapiens
catagatgttttaagagcaaagtttaaaggtctggagttttgtgtttatttttgtttttaaaataaatttgagtctatgtagtgaaatgkctttacattcccttgcagctgttttaagcattacattattcaaactgtatcagaaaaatctgctgactgtcgaaaacctaaatgatgaa

SEQ ID NO: 1045 - DNA, 179 bp, Homo sapiens
actattattgaactatatttttttctacaggttgagaagatttttttccttaggcttgagggaaactgttacaatcaaagtgtatttatratttatatataactactttcccaaaaattcatgtccaatttctatattgaccaggcctggtagatagtcatacattagcggtgcttctg

SEQ ID NO: 1046 - DNA, 179 bp, Homo sapiens
ttgattaacacaatattcattttttaacttttcattccagctgtttggcttggaggaatcctcagaacctaaggaaaaatgaagtctcartcctataagttgagtgaagtacagtgttcctttgagctaccaaattgtactagttaacctaaagtgacctctctggtttttaagtggcc

SEQ ID NO: 1047 - DNA, 179 bp, Homo sapiens
ggcagtacaactgagtatggtggtcgtggcagtgaagggatattcactctttcctatggggcgaatatcttatctttacaaattagttcygatgtaatgggtccatagatttcctttaagaaaccactgagctaaaacaatagtcctgatgttcctccttctttaaaaaaaaactccaa

SEQ ID NO: 1048 - DNA, 179 bp, Homo sapiens
tatacatgcaccatgttgctgtgctgcacccattaactcgtcatttacattaggtatatctcctaattctatccctcccccctccccccmccccacaacaggccccggtgtgtgatgttccccttcctgtgtccaaatgttctcattgttcaattcccacctatgagtgagaacacgca

SEQ ID NO: 1049 - DNA, 179 bp, Homo sapiens
caaaactgtctggtagaattcttagtagtggttttactcgcatggcccataggtttctttctactgaaaatgtttaattattaaacccaragagtcagagaaatagacttgtacaaatcatttatttatgaaagttctttaggctttattccttttgcttttagatctattagtataat

SEQ ID NO: 1050 - DNA, 179 bp, Homo sapiens
gtgtttgccttcattttccccttcaatttcctctgactactgaggaaatgtaaccttagcacttcgttggtgaatctgaaaagactgctytgcttatgagatgttctttgttgactaaatttctaagtcatcatgataataatgctttataatttacaaactgtcatcccatgcagtca

SEQ ID NO: 1051 - DNA, 179 bp, Homo sapiens
acttggtaagttgtctgtaatgtagctccagggcaaacacaaagtgtacattgtgggaaaataaagcaaaacaacaacaacaaaacacarataaaaaatgtttctcaacagctagagtccatgagcatagttttataatttgcttcctgctccggtaggaaatttaaatcggttcttga

SEQ ID NO: 1052 - DNA, 179 bp, Homo sapiens
ctagcttattttattgagtgtaatgtgctcatgttttatctatgttgttgtatatagaaggattttctttttttaaggctgaatagaagrattttcttttattaaggctgaataatattatatgtgtatacttaattttttattcatttgtgtgtcaattgatatttaggtggtttcca

SEQ ID NO: 1053 - DNA, 179 bp, Homo sapiens
aagaacaagccccagattgagaaaacaattgcaaagtaacaactcatttaagaacctttatccaaaatagacaaataactcgagactcawcagtaagaaaatgaacaacttgattaaaaagtaggccaagaccttaacggacacctcactaaagaagataaacagatggaaagtaaaca

SEQ ID NO: 1054 - DNA, 179 bp, Homo sapiens
aggaagagcacagaagatgcttaggctggtgaaacttctgtatgatagagttataggagacacatgtgatttgaaatttgtccaaagccrtggaatacatttgttcaaagccaagagcgaacctgaatataaaccatggcctttgggtaataataatatgtcaatgcagtttcatcaat

SEQ ID NO: 1055 - DNA, 179 bp, Homo sapiens
agcttccacctagatttcaggggatgtatgatatggtttggctctgtgtcctcacccaaatctcatgtcgaactgtactttccaatgttkggggagcaagctggtgggagattactggctcatgggggtgaatttccccccttgccgtccacatgatagtgagttctcatgagatctga

SEQ ID NO: 1056 - DNA, 179 bp, Homo sapiens
cccaggcttgggtagttctttttagcagcgtgagaatgaactaatacattgtatgagatagcctgggtgcctgggcagagcccctgcagwgagcctctactaggcagagtcaagggggaattgtggggttgaagccttcccacagagttctcactcaacaactgcctaaaggagctatg

SEQ ID NO: 1057 - DNA, 179 bp, Homo sapiens
tcctgctgccatgtgaagaacgtgcttacttcctttttgacttctggcatgattttaagttacccaaggcctcccagtcatgcctcctgytaagcctgcagaactgtgagtcacttaaacctcttttcttcataaattacccaggcttgggtagttctttttagcagcgtgagaatgaa

SEQ ID NO: 1058 - DNA, 179 bp, Homo sapiens
tcttgagtagccacttagctcctggatctataatcttagctcagcagaaggttgttgtagcaaaatagagttactcctgaaaacatgaaktaccaacacttacatacatttagaatttatacaatcaaattctataaatttgattttatagaaacatcactgaaacatcaaaacagata

SEQ ID NO: 1059 - DNA, 179 bp, Homo sapiens
ttgttgaatttgttcattcctgactaatttctttacatacagaggggcatgcatacaccagtcaaaaataatgaggagatttttatggayttttattctaattactgcagaattctctcttcattgataccatttatgtgaaatggttttcagggtaggataatgtcctctgaagggtg

SEQ ID NO: 1060 - DNA, 179 bp, Homo sapiens
ttgtgtatttgagagacaaaaaacattgcaacatttttgctctggctgcgtacttttcggttgaacttttaaagcatcatgtctgtcagygtataccttacagtcttatttaactgtcatattagggaaggtaagtgtgcattctccaaatttgtcactagatggaagaagagaacttt

SEQ ID NO: 1061 - DNA, 179 bp, Homo sapiens
gttatataaaatatctcatagttataagagtctattttaagctgataagagcttaagttcaattgaatacatagctctacattttatttmtctcttcccccacacatatttaatgctattgtcatctcagtttacacctattcttattttgtatgttttaatacatttttacttattat

SEQ ID NO: 1062 - DNA, 179 bp, Homo sapiens
tgggaatatctgactctgatcataactcaacctctaggccttagttcccacaacttaagaacgattaaatttaaattcagtttcttaagkttctgtttaactctaacattccatgtataatatatttgtcacatgtatttgcttagttcatcatcttcttgtttccttaacacttgacc

SEQ ID NO: 1063 - DNA, 179 bp, Homo sapiens
tccccaatcccttttatctttaccttccaaaccttcatttctcaaggtccattaaaaatcccatactgcccaccatgtattctatttccmatacaaaaaaattctctttaacattccacactagtttgcttgaatcgctgttccaatacttttcattgtgaggtgtggtaattttcata

SEQ ID NO: 1064 - DNA, 179 bp, Homo sapiens
gtaatcccagcactttgggaggccgaggcgggcggatcacgaggtcaggagatcgagaccatcccggctaaaacggtgaaaccccgtctytactaaaaatacaaaaaattagccgggcgtagtggcgggcgcctgtagtcccagctacttgggaggctgaggcaggagaatggcgtgaa

SEQ ID NO: 1065 - DNA, 179 bp, Homo sapiens
ccttgagcagtggtttgtagttctccttgaagaggtccttcacatcccttgtaagttggattcctaagtattttattctttttgtagcarttgtgaatgggagtttgctaatgatttggctctctgtttgtctattattggtgtatagaaatgcttgtgatttttgcacattgattttg

SEQ ID NO: 1066 - DNA, 179 bp, Homo sapiens
gtgccataaagattaaatgaatatgcagagggtcttaaaagggtcttagtccttttatgttaaaagcattctcaatctgatgaaagtaamacacacacacacacacacacaccatcacacaaacatacaacccctaagtctaattgttgcatgaagaatctctgagaattttgtgtttg

SEQ ID NO: 1067 - DNA, 179 bp, Homo sapiens
gactctttatccaattttccagtctatgccttttaattgggacatttagcttgtttacatttaaggttaatattgttatatgtggatttkatcctgtcattatgatgctagctaggtattttgctcattagttgatgcagtttcttcatagtgttgatggtctttacaatttggtatgt

SEQ ID NO: 1068 - DNA, 179 bp, Homo sapiens
atccacttgggcgtaatagtctaattctgaggggaatatttttctacacaatagctgacctatccatgcttcttctttcttacatacctyggcttttgacctccttaaccctaacatcacccactttccttcatgattgaaaatgttgatgatcctttctcttttctattttccttgat

SEQ ID NO: 1069 - DNA, 179 bp, Homo sapiens
tcttagtattcaagattatatcaacttgtccatattttcctgtcgtcatgtcatttggagtatcaaatgacaagagtattgaccattttragtatcattcaaaatggattcatccacttgggcgtaatagtctaattctgaggggaatatttttctacacaatagctgacctatccatg

SEQ ID NO: 1070 - DNA, 179 bp, Homo sapiens
gtttttcaatgtacattacttgtttcctgtttaggagagcagtttttacaattgtatcaggctgttaataaatacatttcagtgacttcrtcagctaatgaatatgatcagtacacctgtggattttttctaagattaggttatcaagaagtagttttcttactaaagctctagattga

SEQ ID NO: 1071 - DNA, 179 bp, Homo sapiens
acatcttggtgcctggtcaatataatcaccacagaaagttatctacaaagaacgtctatggtgggtgtggtagatattttatgacattayttgggcaaaatatctgactaattatttctccttaaattgttaataacaagtatttaatttttttctttattaaaatacttcattattaa

SEQ ID NO: 1072 - DNA, 179 bp, Homo sapiens
ttcttagtattcaagattatatcaacttgtccatattttcctgtcgtcatgtcatttggagtatcaaatgacaagagtattgaccatttkgagtatcattcaaaatggattcatccacttgggcgtaatagtctaattctgaggggaatatttttctacacaatagctgacctatccat

SEQ ID NO: 1073 - DNA, 179 bp, Homo sapiens
taggaaaatttaaacagcagctaaagacaatgaatgaagactgggaaaaaattattatgttttgttatataacaaaataaaaggataagstgagtcatgacaagtgtgtttgccttcattttccccttcaatttcctctgactactgaggaaatgtaaccttagcacttcgttggtgaa

SEQ ID NO: 1074 - DNA, 179 bp, Homo sapiens
ccagttagtgttaacctacacatatgcatactatcatgttcatcaaattgtctatattgaggaatttaaaagaacattacagacactatmataagtagtcagtgttattattggcatcattgcagctttatttttgttttgttgctgttgagcagagatatttaaggaaagttgcattt

SEQ ID NO: 1075 - DNA, 179 bp, Homo sapiens
ggcccatgttcataactagtgagaaggaggaccataagtctgacactactttgctatattgctctactatcacaagcttttaaattttgyctgcaatgtttcattttgcttttaagcaccagtgtatctgtaagactacttctattggtctgaggactccgctttcacaaaaacttata

SEQ ID NO: 1076 - DNA, 179 bp, Homo sapiens
tttgcctgggtatcagcagcggtggctgcagaacagcagattttcatgaaccgtgaatgctgctgtgtgatcgttcctctggaagttttktctcagaggagtacccagccatgtgaggtgtcagtcttcccctactgggaggtacctcccagttaggctgccctggggtcaggggtcag

SEQ ID NO: 1077 - DNA, 179 bp, Homo sapiens
ttctcaaccattatttatttattgcttttgtatatgatgtctattaaaaaagaaaatatggatagccagatatatatttagaaacttttycagaaatagggcatacattctcctatggtacagctaaaacccttatgggctttctactgttctgagagttctccagcctccccttccat

SEQ ID NO: 1078 - DNA, 179 bp, Homo sapiens
aacatgtaacataattttgaaggaaaaaaaagttggaagactgatactatccaaatttaaaacttataataaagttagcacaggacaaamgaatatacaaatagattaatgaaacaaaatagtcccaaaatagatccatatgaatatagtcaactgatttttcacaactaagcaatgat

SEQ ID NO: 1079 - DNA, 179 bp, Homo sapiens
gcttaaatcaaacagtcacctggaaggaacaggtctctggagactcccctctagctctgagatctgtatttcacaattatttgaggcacygttaaaagcagagaataaaatagttgaaaattcacttgctgttttcaatgtattatttatgcaagagaatgtgtaatttgggaaaaaag

SEQ ID NO: 1080 - DNA, 179 bp, Homo sapiens
tcacctggaaggaacaggtctctggagactcccctctagctctgagatctgtatttcacaattatttgaggcactgttaaaagcagagartaaaatagttgaaaattcacttgctgttttcaatgtattatttatgcaagagaatgtgtaatttgggaaaaaagtaaatctgaaaactg

SEQ ID NO: 1081 - DNA, 179 bp, Homo sapiens
gaagccactggcaaattttgttcatcttcaaaatgtttagaacatctctcaatgcatggagctacagaaatttgtagagccttctgtctrtggtggcaaggttatgctgaggagtggccattgctgctgaaacaagtttgtcagtctggaggtcttgcagatatacctggcctgaggac

SEQ ID NO: 1082 - DNA, 179 bp, Homo sapiens
acactgagcagaaattagaagaaatggacttctttatctgtacacctgccttccgtactgtaaggcactgtgtggaaaagtctcctggaytaatgatttctatactggaaaaagtggcaatgaggcatgcagccagcttccccatcagcttgggtttctacacagaacagctgtttctg

SEQ ID NO: 1083 - DNA, 179 bp, Homo sapiens
cctgaatccatgcccagccatgtatgtcgtctttggaaaaatatccattccagtactttgtccatttttaatgacctaaattctgtgggrtttttttagtggttttgatattgagttatagaagtttcttatatattttgaaaagtaatcccatatctgatatatggtcgcaaatatgt

SEQ ID NO: 1084 - DNA, 179 bp, Homo sapiens
tttggtgttaaatccatgaaatcattgccaagactaagatcataaaaaatttcccctatgttttctttaatatgtttacagtgtcagatyttacacttaagtttctaatctattttgagctaattttttgtgtatggtgaaaatttatccctgctctctttttgttaccatttggatag

SEQ ID NO: 1085 - DNA, 179 bp, Homo sapiens
agaaccatgagatttcatgagacttattcactaccacaagagcagtatgggggaaaccaccaccatgattcaattatctcccaccaggtmcctcgcacaacaagtggggattatgtgagctacaattcaagatgagatttgggtgggtacacagtcaaatcctattagattattaaata

SEQ ID NO: 1086 - DNA, 179 bp, Homo sapiens
tattgagataatcatgtggtttttgtctttggctctgtttatatgctggattacatttattgatttgcatatattgaaccagccttgcaycccagggatgaagcccacttgatcatggtggataagctttttgatgtgcttctggattcagtttgccagtattttattgaggatttttg

SEQ ID NO: 1087 - DNA, 179 bp, Homo sapiens
tgggcaagatctgtttcttgctaccaccaaactggctttttcttagaaaatgctgtgagatagagagacacaataggggctgccaagctrcaaatgaaattccccttgttcagttccacttatttaagtgtaaaacaatttttattcttccattaagcacattcacacaaagagagaag

SEQ ID NO: 1088 - DNA, 179 bp, Homo sapiens
gcacctgtaatcgtggcacttcaaggcagaaggatcacttgagcctagtggtttgagaccagcctgggcaagatggtgaggccccatttstacaaaaagtttaaaaaattggctgggcagggcatgatggtgcatgcctgtagtcccagctccttgggaggctagggcagaaggatcac

SEQ ID NO: 1089 - DNA, 179 bp, Homo sapiens
ttatatgaacaatttagaaaaaaagaaagtttggaagactaactccatctgacttcaaagcttactttaaagctgcagtagccaaggcartgtggtattgatatcaagttagacaaatagattgatgtagcagaatgaagagtccataaatcaaccacacatatattgccattttagtt

SEQ ID NO: 1090 - DNA, 179 bp, Homo sapiens
tggcgggatctcggctcactgcaagctccgcctcccgggttcacgccattctcctgcctcagcctcccgagtagctgggactacaggcgmccgccactacgcccggctaatttttgtatttttttttttttagtagagacggggtttcactgttttagccgggatggtctcgatctcct

SEQ ID NO: 1091 - DNA, 179 bp, Homo sapiens
gtttcctgagtcctaccagtcttgcttcctgttaagcctgtggaactgtgagtcaattaaacctgttttctttctttttttttttttttyataaattacccagtctcaggtggttctttattgcagtgtgagaatggactaacttattatagttatatagtgcttactaatgctgggca

SEQ ID NO: 1092 - DNA, 179 bp, Homo sapiens
ctttcctccaatctgagtttttttttttttttttttttttttttttgagacggagtctcgctctgttgcccaggctggagtgcagtggcrccatctcggctcactgcaagctccgcctcctgggttcaggccattctgctgcctcagcctcccaggtagctgggactagaggcgcccgc

SEQ ID NO: 1093 - DNA, 179 bp, Homo sapiens
taaaaattagctgcatgtggtatcatgtgcctgtagtcacagctacttgggaggctgaggtgggaggattgcttgagcccagcaggtcasggccacattaagctgtgatcacaccgctgcactccagcctgcacaacagagtaagaccctgtcttcaaaaaaaaaaaaaaaaagaaaaa

SEQ ID NO: 1094 - DNA, 179 bp, Homo sapiens
ttttacatgtatgtgtatatatgatttctctagcaacttttattgcttggcagaagcagctgcaatagttagaaggaaaaagattttttwaaaaaaaatctgcttcctgaataagtatataatgactgtataacaaacagagctgaattcaaaagtcaacaatgtaaggttcattgcat

SEQ ID NO: 1095 - DNA, 179 bp, Homo sapiens
atcatcatcatctgattaaacgatgaggaaataatgagtagacatttcttaaaaaaagacatacaaatggataacaattattttaaaaaygcacaacatcattaatcatcagggaaatgcaaatcaaaaccgcagtgagatatcacctcaccccagttggaatggctgttataacaaga

SEQ ID NO: 1096 - DNA, 179 bp, Homo sapiens
ctcttttccccaacagcccttctcattcaccagcagtagcccaagacacatcatcagacggataactatagcctaaaggactccccttcrtagttccactttggttgctggccatgtttcctttctcagtcaactggctggtgatgcctcttatcatgcaactccccctttcaagtttt

SEQ ID NO: 1097 - DNA, 179 bp, Homo sapiens
taataggagaataaatattttgaagagtgaggaacaactaaaaatttctgatttgtcatacactaaaaaaaagtttttaaaaataatgayaacaaattttaaaatcattttcatatttaaaattgccattatcctttaacatgacctgaataaatgcatctagagatatttgattatat

SEQ ID NO: 1098 - DNA, 179 bp, Homo sapiens
tttaaagataaggaaactgaggccctgacagtttaaataatttgccttaggtcacaaaactagttttgtttcccccctagagagtatgtmtctacattaagaccatgtatgtctccatatactgtcttaatcactatactacaaagctctagtacaatgaagatatagagatgcttaaa

SEQ ID NO: 1099 - DNA, 179 bp, Homo sapiens
ccacttacttaagctctcatattcctcacactaaattaatgataatgttgcctatttaccgcatacagttggtaagtttaattgagcctrtcgtgtagaacatgatgaggggcacactggagatgctgaaaaagtagattattttgtttcgttgaacaatttacatatacatatttaaa

SEQ ID NO: 1100 - DNA, 179 bp, Homo sapiens
atcatgtgatttttgtttttaattctgtttatgtggtgtgtaatatttattgatttgtggttgtcaaaccgtccctgcatccctggtatraaacccacttgatcatggtggattttcttttcgatatgctgttggatttgactatagctagtattttgtttaggattccagcatctatg

SEQ ID NO: 1101 - DNA, 179 bp, Homo sapiens
tgagaagatttttttccttaggcttgagggaaactgttacaatcaaagtgtatttataatttatatataactactttcccaaaaattcaygtccaatttctatattgaccaggcctggtagatagtcatacattagcggtgcttctgaggcaaaagctaccttccatagtcaaagaaag

SEQ ID NO: 1102 - DNA, 179 bp, Homo sapiens
cattgattttgtatcctgagactttgctgaagttgcttatcagcctaaggagatgttgggctgagacgatggggttttctagatatacawtcatgtcatctgcaaacagggacaatttgacttcctcttttcctaattgaataccctttatttccttctcctgcctaattgccctggcc

SEQ ID NO: 1103 - DNA, 179 bp, Homo sapiens
ttcttatccaggctgtcaccaaatccttttacttcttgcccaacagtctcttaactctatctcttctttggtctcttttgccaaataccrtatgctgattaggccttctcttaatgttttcttttgtttattttaaacctcttgattcctctctccctgattgccacctcactgctaga

SEQ ID NO: 1104 - DNA, 179 bp, Homo sapiens
aacagtgtgttggaatatacacacaataagccctgattgacacaatgcattaaaaaacaacccagtaatgtcaaggaaaaaaattaatakgtatgcctgtatattaggctaagtaactaaatgctttagaaatacacttcagctgataagacctaccagtatgcaaggagtgactaatt

SEQ ID NO: 1105 - DNA, 179 bp, Homo sapiens
attttttcttcgttttcacctctctttcttctataacaagatgttgttgtagtctctcaaagggatcactttcctgattgtacacttttyaccctttttattattctggtctttatgagaactcttttctgatttctaagcacctgtatgtcacaaaccagtttgcattatgtgcctct

SEQ ID NO: 1106 - DNA, 179 bp, Homo sapiens
aacagataacttagaccaaaagttctaagctgggaggtttgttataaatgtcttccatataacactagcctcctaggccatttaaggctrgagttcaattaagcaaaatttaaatctaaatgtcagtgtggtagagagggatccttaccataatctgatttatcgcttggttattacga

SEQ ID NO: 1107 - DNA, 179 bp, Homo sapiens
ctgacaccattaacttaaaatatggttgcttagtaataaaatacattgaatatgtcatgtattcatactttgtagtatgtttgctgcagrtgcctgagaattttttttctcacttttccactgttttgcaggaggagtctttggcatgactgtgttaatgtaaaaggtattaattctag

SEQ ID NO: 1108 - DNA, 179 bp, Homo sapiens
gtgaggaaatttccaccaatgtccaagatgaacaagtgttaccatttttcatttttctactattgataatctgttatctaatctcagctscctccactctttcttccatatgtaaactcattaactctgatactgggacttgctacaatatgacaaagttatgccatttttcaaagtgt

SEQ ID NO: 1109 - DNA, 179 bp, Homo sapiens
taatgtatgaactcttggtaagggaacttcaaatgtttactctaatgtctctcaaagtgtggtccctggaacagcagcatcagcatcacmtaggccctcattagaaatgcaaaatctgtggcccctgctctactgaaaggaaattttgggggtgggtcacagctatccgtgtgtaacaa

SEQ ID NO: 1110 - DNA, 179 bp, Homo sapiens
caagcacaattaattttagggttgattttgcagtttgtgagctctctaggctttgcgcttctcttctgttcttctgtaacctaccatttygatatggggggggtggggtggtattgcaacctcaataaaacttagaaaaaaggaaaggaaatcaggtgcctttgttcatttcttcaaaa

SEQ ID NO: 1111 - DNA, 179 bp, Homo sapiens
tcagcctccccagtagctgggattacagcctggctaatttttgtatttttagtagagatggggtttcaccatgttggccaggctggtctkgaactcctgaccacatgtgatccacccacctctgcctcccagaagtcctttgagcttcttatatttggatgtctagatgtctagcgaga

SEQ ID NO: 1112 - DNA, 179 bp, Homo sapiens
gaaagagataaccttcaagaaattcctgcctttccaacaccataggagacagtgaactcactcacacaccaaaaataaaactactacagygcaatcaaggagagccaggaaacaaagactctatagctaaataactcataccaagtcttcacccctacaagcatgaagaatcaaattag

SEQ ID NO: 1113 - DNA, 179 bp, Homo sapiens
gcgttaattgcctacatcaagaagtctgaaataggacaaatagacaatccaaggtccagctcaaggaactagagaaataagaacaaaccraaaccaaacacagcagaaggaaaaaaaagtaacaaagatcagaacagaactaaatgaaattgaaacaacaccacaatacacaagataaa

SEQ ID NO: 1114 - DNA, 179 bp, Homo sapiens
aaacaaaattgatagaccactagtgagattaaccaagaaaagaagagagaatatacaggtatgctcaattagaaacaaaacaggagatgwtaaaaccagtaacacagaaatacaaagaatcatgcaaatctacaatgatcaccttaacatgaaaaactagaaaatctagaagagaagta

SEQ ID NO: 1115 - DNA, 179 bp, Homo sapiens
aaatgaaattgaaacaacaccacaatacacaagataaatgaaacaaaaacctggttctttgaaaggataaacaaaattgatagaccactrgtgagattaaccaagaaaagaagagagaatatacaggtatgctcaattagaaacaaaacaggagatgttaaaaccagtaacacagaaat

SEQ ID NO: 1116 - DNA, 179 bp, Homo sapiens
atgaaacaaaaacctggttctttgaaaggataaacaaaattgatagaccactagtgagattaaccaagaaaagaagagagaatatacagrtatgctcaattagaaacaaaacaggagatgttaaaaccagtaacacagaaatacaaagaatcatgcaaatctacaatgatcaccttaac

SEQ ID NO: 1117 - DNA, 179 bp, Homo sapiens
atagaggtatgtacattacatttattttctattgctgccattttgttatatatatcacctgccatatttattatatatatttattacacmtattaccacgtttatagaggtttaaaataacataaatttattatcttacagttctgtaggtcagaaattcactgaatctcattggacaa

SEQ ID NO: 1118 - DNA, 179 bp, Homo sapiens
ctcctcccatctctgtctccctcttcccctccctgcttccctcctccccaccttccctccctcttcccctccttccctccctcttccccwccttccctccctcttcccctccttccctccctcttcccctccttccctccctcctcaagcacaacacatccacatcggcccccagccca

SEQ ID NO: 1119 - DNA, 179 bp, Homo sapiens
gcccagttcagggatctgaattctaccttggagtgtttctctagtacacttactacctagaaaatcaaaggatgtcaaatgcaagtactycttagaaatcaccatatgtgaaagtaaagacaaaaataatttttgcaggctgggcatggtggctcatgcctgtaatcccagcactttgg

SEQ ID NO: 1120 - DNA, 179 bp, Homo sapiens
cacttttatcttaaacaccactctttgtgtatataactcaacaaaatccaattttctatttttattagaatttgtcatttcaaatttctrcaccaagttatcaccattttcccacactgactgattttccaacactatttgtcaacagcatgtattagttcagttaattttcatctcaa

SEQ ID NO: 1121 - DNA, 179 bp, Homo sapiens
gaaagtaaagacaaaaataatttttgcaggctgggcatggtggctcatgcctgtaatcccagcactttgggaggccgaggcaggtggatyacaaggtcaagagattgagaccatcctggccaacaaggtgaaactccgtctctactaaaaatataaacattagctgggcatagtggtct

SEQ ID NO: 1122 - DNA, 179 bp, Homo sapiens
tcagatgcaacaaaagaaatgaaatttttggtggctgttgggcaagctgatgttgactattgctaactaggcctggaagatatgtcatasatagggcttagagaattaccagagcaattgaaagtagcattgaaagaggagtttagtaaataagtatactgaggacaaactttgcattt

SEQ ID NO: 1123 - DNA, 179 bp, Homo sapiens
aattatacagaatcacatttcaaaaaaaaaaaacatgatacaattatttttaagacaacagcttagattattactattttttcccgtacyctcagacttaatggctgagtagaaagtaactatttttaaaaagaactaagctgctttatctttagaccatgcaatggtactaactttgg

SEQ ID NO: 1124 - DNA, 179 bp, Homo sapiens
cttattttgctctatctagatgttatcccagaagtagtagcataggataaacttttcaaaaacttttcttttcttttcaaaaatgaagcmatttgtgctgttcaaaaattctagttggtacctttaagaaagtataaatgtggagaaaaaaatgtaacacattctcttttatggtaatg

SEQ ID NO: 1125 - DNA, 179 bp, Homo sapiens
ttactctaattatacagaatcacatttcaaaaaaaaaaaacatgatacaattatttttaagacaacagcttagattattactattttttyccgtaccctcagacttaatggctgagtagaaagtaactatttttaaaaagaactaagctgctttatctttagaccatgcaatggtacta

SEQ ID NO: 1126 - DNA, 179 bp, Homo sapiens
ccactgcactccagccagggcgacagagcaagactccgtctcaaaaaagaaaaaaaagaaaaaaaaaaaatatatatatatatatagggrgagagagagagagagagaagaaagtaatgagtcagaaacttttactattaatataatgttcaaaattgaatcccttaggactagcataa

SEQ ID NO: 1127 - DNA, 179 bp, Homo sapiens
cacacacacacacacactcactcacagccctgtctcccataaaacacctctttaggttgcaggcccttccaaagcatccccttgttacayacctctaatacacaagctgaaaccttcacttctagctaaactctacttatcttgccttcccagctaaagagattattccaactacacaa

SEQ ID NO: 1128 - DNA, 179 bp, Homo sapiens
tgcagagtttcagagaggaaggtacatgccattctaggaatcataaaatgtttcttggggcaaaagtatgtgcactgaaccttgtgtagytggaataatctctttagctgggaaggcaagataagtagagtttagctagaagtgaaggtttcagcttgtgtattagaggtgtgtaacaa

SEQ ID NO: 1129 - DNA, 179 bp, Homo sapiens
tcatacattctagtttacttcaaaagacctggtttagaaatattacccagtatcctgactgcatgattttttgttctcaaaagttttccratctgggtgataaattactctaattatacagaatcacatttcaaaaaaaaaaaacatgatacaattatttttaagacaacagcttagat

SEQ ID NO: 1130 - DNA, 179 bp, Homo sapiens
aaaaaaagagaaaaacttatcaaatgaatctgttgaaatagttgaaataagatcagaaataaagtgtggtgaatgtggaacatggataayattatggaactaagaaattaaataattagactataaaccacacggagagtctggttattaagtgaaacaactgaaagaattgagatgaa

SEQ ID NO: 1131 - DNA, 179 bp, Homo sapiens
cctcagcctcccaggtagctgggactagaggcgcccgccaccacgcctggctaattttttatacttttaatagagatgtggtttcaccgygttagccaggctggtcttgatctcctgacctcgtgatccgctcgcctcggcctcccaaagtgctggggttacaggcatgagccaccgtg

SEQ ID NO: 1132 - DNA, 179 bp, Homo sapiens
taactctatgttttccccaagaaaagttgtttggtattcactaggtcagtgttcacagtgactgtatagagtgtaactactgagaataakgagaatcaactatgttttatgaatttatcccctacttctgattaccaagtcaggataaaactaaaactgtgctctgcttatctctactt

SEQ ID NO: 1133 - DNA, 179 bp, Homo sapiens
tagatcaccaaaaaatatatgcaaaaaccaaccacatacttattagcagtcattctccacacaaccccttcctacagccccaggcaaccrctaatcagctctctgtccaagagtttgtccatgctagacaattcacataaatcatatagtatatggaaagggattcattattttatttt

SEQ ID NO: 1134 - DNA, 179 bp, Homo sapiens
gaaaatcaggctacacgattgttactcagttgaaatatgaaggcttttatttgttagtttttattttgtttaatctgtgtgttcccagtrgaaaaaatatgcttcatttagttaggaaaaattgtgactatgtttgtgtctcattatgttaactggcaaatattttcatttgctttcca

SEQ ID NO: 1135 - DNA, 179 bp, Homo sapiens
tagactaattgtctagttgtgggttcagctgtgcttttgaatggtcagcaatgcactttactgtggataactgtgttggaatgacttttrgtattacatgtatagtcaaataaatgttcattaaaagtaatagagagcagatgatgactttaattttcttgttattttccatagaatat

SEQ ID NO: 1136 - DNA, 179 bp, Homo sapiens
tctcccacctcgggctcccacagcactaggattataggcatgacccactgtgcctggcctcaaattacagtttgatataaccaagccacmgtttcctagatgatagtgtgttaatctttaaaatgcagaagaaagcttgtttgaacctggaaatgtaactctagaccacaagaagatat

SEQ ID NO: 1137 - DNA, 179 bp, Homo sapiens
tgaaattttggtagtttactttttaaaagtgaaaaactagcttttttacatttttcaccagatgttcttttaccagaaagaagacaagarcctgggaaaaatttcctctgtcctttcatatttctagaggaaatatgagaagaacctggttaaaacaaaacatctcaagggtagaggat

SEQ ID NO: 1138 - DNA, 179 bp, Homo sapiens
gaagtagtgagagaaaataaagttcttacttggtactgaaggtctttttttctcatcttcccagacaccaagatgctaggaggcttccaygtgtgccttcattttttatttgctttttcagacactagaggaatgtattgcttcctccctctgactgattcccctggcaagcctctacc

SEQ ID NO: 1139 - DNA, 179 bp, Homo sapiens
attcttttcatggtctatttttcatatttttgtgatgttggtgattttgctcttcaaaatgttcccccagcatagtgcttaactgttatstgatattgctaggtgcaagaaggctgcaatgtgccttacaaagaaaatccatttgtgtaggcatgagttatagtagcatttgagttcaa

SEQ ID NO: 1140 - DNA, 179 bp, Homo sapiens
atttggacatagactttgccctaaagcactttatagactagcagcctacatacagttaaaatagctaaagaaaaggaagcattccaatcrgtatttctatatgtttggtcattaggaaacattgggatgggttactggaggtttccctattcattgccatgatttaaattagctgattt

SEQ ID NO: 1141 - DNA, 179 bp, Homo sapiens
tcaaaatcatggaggaaggcaaggaggagcaagtcatattttacatggatggcagcaggaaaagagagagagcttgtgcagggaaacccygatttttaaaaccatcagatctcatgagacttactcactcttacaagaacagtacaggaaagaccgcctccatgattcaattacctctc

SEQ ID NO: 1142 - DNA, 179 bp, Homo sapiens
cactttgagtctttagactactgtcgtcaaatttaaagaattctttaaaaatgctttacttattccttcttgtctttttttttttttttkcaattttataactttatttgaggtatttgacggtcagcgattagttctcctccacattgactctctgtagatttttgaaagtggttaac

SEQ ID NO: 1143 - DNA, 179 bp, Homo sapiens
caagcacttggtaaaattccacaggcacccaaagttaaataaattttctaaaatgatgaaatttatcaatttgcttcatctgagacattrgacttatgtaaatgatatatttttctaacccagtccctttatgagtataatttgtaattagccatagaataatgtaatacaaattttaa

SEQ ID NO: 1144 - DNA, 179 bp, Homo sapiens
tgcttttagattttcagtctctctgagagaaaaagaaatgaaagtgtcatttgctttcatctttgaatggttgtcgtgatgctgtgatayggctttctagtaggaaaaataaagacaacaatgagaaaaagataagtcactgtcatacaagtgaatttaagaatgaaatgtcactcaga

SEQ ID NO: 1145 - DNA, 179 bp, Homo sapiens
tctcattcctccccctggattaagttcttctctggaatttttgagttcaggtcaggtaaaatagtttgaagaccacttttctagttgaakccagggttactctgagtacctaagtaatgataattctttatcagctgtatactatgtacatgccgcttggctatgtgtagaatctctaa

SEQ ID NO: 1146 - DNA, 179 bp, Homo sapiens
tgaataaaaatatttctgccagtcattgaaaatattttctgattttttaacatcattatacagtcctcttcaaattttattgttagtcartctcagcacagggtcaacaccactttcatatcacaagtaacccaaagaggaacatgcttgtaggaagcataagtgtcagccacccaaaa

SEQ ID NO: 1147 - DNA, 179 bp, Homo sapiens
atatattcatgatgatacagctacaacacagatagcatctctgtcagtcttgtttactaagtggctgtgtggagcaaagtaccactcctwcctcccactgatattcattggatccataagacaagcattaaatgcattcttacttagttaagccactgagattggggtttaatttgttt

SEQ ID NO: 1148 - DNA, 179 bp, Homo sapiens
ctttcatctttgaatggttgtcgtgatgctgtgatatggctttctagtaggaaaaataaagacaacaatgagaaaaagataagtcactgwcatacaagtgaatttaagaatgaaatgtcactcagaactattcttggtattctataagcaacataactgcagaataaatacagaaagaa

SEQ ID NO: 1149 - DNA, 179 bp, Homo sapiens
tcttaatcatatctgcaaagtacattttgccatgtaagataacatattcgcaggctccagggattgggaggtggacacctattattctgyccaccacatacaggatgctacagaaacagaagaatgtttaatgcaatgcaagaaagtaaacttgaaatggaatatattaaactcctcaa

SEQ ID NO: 1150 - DNA, 179 bp, Homo sapiens
tgaataaatgaaaagtagaacacatagtggaaaacttttagaaacaaatgtgaaataagaaagtgtggctctgattttggtataagacarttctgaatccaggacttgaaagcattaaatagtatatagaaaggtactttatataaagttgtactctacgatgcctagtgaagataggt

SEQ ID NO: 1151 - DNA, 179 bp, Homo sapiens
aagtagaacacatagtggaaaacttttagaaacaaatgtgaaataagaaagtgtggctctgattttggtataagacaattctgaatccargacttgaaagcattaaatagtatatagaaaggtactttatataaagttgtactctacgatgcctagtgaagataggtgatatataaata

SEQ ID NO: 1152 - DNA, 179 bp, Homo sapiens
agccaaccctagttaatgctgacctgttgctctgtatctacctgactctcaataactgcctattcagatttctaacctagaatatctacyactcaagttgcttattaaagacaattttgattggcttggctttatacagaatttaaacatttaaataaaaaaaatccacttttatctta

SEQ ID NO: 1153 - DNA, 179 bp, Homo sapiens
agcaacataactgcagaataaatacagaaagaaaaggcagtagacttggtatagggtggtcatacattctagtttacttcaaaagacctsgtttagaaatattacccagtatcctgactgcatgattttttgttctcaaaagttttccaatctgggtgataaattactctaattataca

SEQ ID NO: 1154 - DNA, 179 bp, Homo sapiens
taataagctagcagagtctttctcacagtgtggtaaaatgggccctttacccagactttcttagtcttggttgtgaagttcaggagaaaygcaaatccttctggagctaagtacctggagatgctccagcagaaggacctctagattaggaaaccacaaagtagttctagttttatcat

SEQ ID NO: 1155 - DNA, 179 bp, Homo sapiens
ttaattcacttgaacattcaatgcactcttcaataatctgacactaaagaggttggagaagatgcagtgtcatttgaaagtaaagaacakttcttgctttttctttctgcatttcagcatagaggagttcagcttcctatcttctgtgtgcccaaataccttcaattcagtcattaaga

SEQ ID NO: 1156 - DNA, 179 bp, Homo sapiens
agaattgtggccaaagccatggatgcctttcttcctgcagttgagtaggaataccctttcctttctcctgagcattaacgagactaaaarggttaaacctatacactcactttatctatgtgtaataagctagcagagtctttctcacagtgtggtaaaatgggccctttacccagact

SEQ ID NO: 1157 - DNA, 179 bp, Homo sapiens
cttcctgcagttgagtaggaataccctttcctttctcctgagcattaacgagactaaaagggttaaacctatacactcactttatctatrtgtaataagctagcagagtctttctcacagtgtggtaaaatgggccctttacccagactttcttagtcttggttgtgaagttcaggaga

SEQ ID NO: 1158 - DNA, 179 bp, Homo sapiens
acttacttaggttctttccatatcttgactattgtgaataatgctgtattaacatggaaattcatatatctttcaaggaggtgatttaaktttctttgggtatgaatccagaagaaagattgctgggccatatagtagttctagttttaagttttgagatgttttcatgtagtttttca

SEQ ID NO: 1159 - DNA, 179 bp, Homo sapiens
agttttatcatacattttcattttttaaacttgagaaatctagaatgggaaaattataacaaggaaattttttttttcaaaacaaggggwaagtgcgtcaaacgaggaatagaatacacccaactttagttttcttgatcacttgtcccaccctcagaacactttattttctaaggact

SEQ ID NO: 1160 - DNA, 179 bp, Homo sapiens
cccacatgttggaaaagggccctggtgggaggtgactgaataacagggttggacttctcctttgctcttctcatgatagccatgatagcraatgagttctcatgagatgtggttgtttaaaagtgtatagtgcttccgccttcactctctctcctgctgctatgtgaagacattcttgc

SEQ ID NO: 1161 - DNA, 179 bp, Homo sapiens
ctcagggctcttgacaaaatgttatatcttcactcttagctcaatactctcccaatgcccctaagataacattaggtgtccgttatataygctcccagtgcagcttttagctgccccttagtcacattttttaattgtaattgatggcttgcttgtccatttctttaaaaagttaaaaa

SEQ ID NO: 1162 - DNA, 179 bp, Homo sapiens
tcactctgatgaccctttgacctggattggagcccccacaatgaacgccacttgccgagaccagctcggtcagggagaccctaacccagyggcactagaggaattaaagacagacacacatagaaatatagaggtgtgaagtgggaaatcaggggtctcacagccttcagagctgagag

SEQ ID NO: 1163 - DNA, 179 bp, Homo sapiens
agaaagagaaatgaacacagtgacttaaattaactcatttaattttcaactatctttttatgtagatgctactattatccctattttatrgaagaggaaactaaggcaccaagtaatgttggtggccatactagcaaggggttaatacttaagaagggtacccaaagtctgacagctgc

SEQ ID NO: 1164 - DNA, 179 bp, Homo sapiens
gtctatgtagtgaaatgtctttacattcccttgcagctgttttaagcattacattattcaaactgtatcagaaaaatctgctgactgtcraaaacctaaatgatgaatgagaattaagtaataggagattcaactgaattttttgctgtaaatacttttacatgctataaaaataatgc

SEQ ID NO: 1165 - DNA, 179 bp, Homo sapiens
acttttatcatgatccacttctacttaatgaatattaaatataccttcctttaaaaataaaaataaagtatacaattcagcagtttttcrgcatattcacagtttgtcagccatcatcactgtctcattacagaacatttagatcaccaaaaaatatatgcaaaaaccaaccacatact

SEQ ID NO: 1166 - DNA, 179 bp, Homo sapiens
ttagccaggctggtcttgatctcctgacctcgtgatccgctcgcctcggcctcccaaagtgctggggttacaggcatgagccaccgtgcytggcccaatctgacatcttaatatgctacattgtcctgctcctgcactcccaacatagctttaaccccataagatatcctgatgcctct

SEQ ID NO: 1167 - DNA, 179 bp, Homo sapiens
gaaaacaatagagaaatcagaagtaaagtcacatgcccccagctacagatcttcaacaccaccaataaaaataagcaattaggaaagaaratggtaaatggtactgggataactggctagccatatgcagaagaataaaactggactcctgcatttcacaatatgcaaaaactaactca

SEQ ID NO: 1168 - DNA, 179 bp, Homo sapiens
actcctgcatttcacaatatgcaaaaactaactcaagttggattaaatgtaagacttaaatgtaagacctcaaactataaaaatcctagraaaaaaccaaggaaataccgttcttaatatcagccttggcaaatagtttatggctaagtccctaaaagcaattgtaaaaacaacaaaaa

SEQ ID NO: 1169 - DNA, 179 bp, Homo sapiens
catttcacaatatgcaaaaactaactcaagttggattaaatgtaagacttaaatgtaagacctcaaactataaaaatcctagaaaaaaamcaaggaaataccgttcttaatatcagccttggcaaatagtttatggctaagtccctaaaagcaattgtaaaaacaacaaaaaaaatgga

SEQ ID NO: 1170 - DNA, 179 bp, Homo sapiens
ctgtaaaactgagagtaaactattagcccttttttaatgagcccattaaagttaatgtgtatacatagaaaatataactatcaaattgtytacagatctttctttgccataaatattttttaagactgcctgtatatttctaggtagatctggcagcagatggagtcaaccatttcaag

SEQ ID NO: 1171 - DNA, 179 bp, Homo sapiens
gagctgggtactaggattcagaaacaagtggggaatttagaaatttaagtaggtaaaatcaagaatgagacttaaatagagttattcccycttaagtgcaggagatatattctaagaccccccccccagtggaagcctgaaacttgcagaaagtactaaactctctctatatatatatt

SEQ ID NO: 1172 - DNA, 179 bp, Homo sapiens
agatatattctaagaccccccccccagtggaagcctgaaacttgcagaaagtactaaactctctctatatatatattacggtttttcctmtacatacatccctatgatatactttataaagtatgctcagtatgagatgagcaacaactattgataaaatagaacagttataacaatac

SEQ ID NO: 1173 - DNA, 179 bp, Homo sapiens
ataaatgatattggcatggtaatgtagctttaggctattgatgattctaactatggtgagaatgaatatcatatgctttggaaaatcctrggtcatcgagcgctgatgccaatggttggatgtcatgagcagacaatgtgatgtctaatgggctggtagcaaatcgtgtcaaccatttc

SEQ ID NO: 1174 - DNA, 179 bp, Homo sapiens
atgaatatcatatgctttggaaaatcctaggtcatcgagcgctgatgccaatggttggatgtcatgagcagacaatgtgatgtctaatgkgctggtagcaaatcgtgtcaaccatttcaagtccatgattattcagaaacaattggtagcatagacatcatggatacactggacaaagg

SEQ ID NO: 1175 - DNA, 179 bp, Homo sapiens
atatagaggaaagggggtcctcgggaagtttttgtttcttttaaagcagctccagaaacatttcttgtctagcaggaaagcccaggctcytagaactgggctggcaagctttgatatgcaaatgctggccattagaaactgggttcaccccaatatgacaattcctgccattttcttcc

SEQ ID NO: 1176 - DNA, 179 bp, Homo sapiens
ctagcaggaaagcccaggctcttagaactgggctggcaagctttgatatgcaaatgctggccattagaaactgggttcaccccaatatgrcaattcctgccattttcttcctcgcccccacatgtgcctggcaacatggctgcccctacatattcccacatgtgtagaatatcatggca

SEQ ID NO: 1177 - DNA, 179 bp, Homo sapiens
accatgtgacaactttactgctagcataaccagcacttgagaaagccagcacactaaacctatctacaaccagagtctacatcactccamtgcctcctctaccagatcagatgctggtgttcatggcagggacacctgaagactagtcatatcactgtactctttgcagacattcccca

SEQ ID NO: 1178 - DNA, 179 bp, Homo sapiens
ggttgctgcgaatgccattatttccttcctttttatggctgagtagtattctatgagatgtgtgtgtgtgtgtgtgtatgtgtgtgtgtrtatatataactatatatatatatacaactatatatatataactatatatataactatatatatataactatatatataactatatatat

SEQ ID NO: 1179 - DNA, 179 bp, Homo sapiens
gatccagaccccaagagagggttcttagatcttgcgcaagaaacaattcagggcaagtctgtaaagtgaaagcaagtttattaagaaagyagagggccgggcgtggtggcccacgcctgtaatcccagcactttgggaggctgaagcaggcggatcacgaggtcaggagatcgagacca

SEQ ID NO: 1180 - DNA, 179 bp, Homo sapiens
cgaaagttctcattctacgcaaatgaatcatcttaccgacacaggaataacttccaacaaaattaaccaagcaacatatcatacttcccrtgccatgctaagaggacagcagacaaagtagatctggaaaaactaaattgcttttatgattaagttaaatccattattaatcacttact

SEQ ID NO: 1181 - DNA, 179 bp, Homo sapiens
cccagggctttagacaaactccaccaattgtcaaccagaaaatatttaaatttacccataacctggtagcacaaccctcaccccaccccytgctttgggttgtccctcctttctggaccaaaccaatctatttcttaatctacttgattgttgtctcatgactccctaaaatgtataaa

SEQ ID NO: 1182 - DNA, 179 bp, Homo sapiens
tcaaataaacgcaataaaaaatgataaaggggtatcaccactgatcccacagaaatacaaactaccatcagagaatactataaacacctstatgcaaataaactagaaaatgtagaagagatggataaattcctggacaaatacaccctcccaagactaaaccaggaagaagttgaatc

SEQ ID NO: 1183 - DNA, 179 bp, Homo sapiens
ttcttagatcttgcgcaagaaacaattcagggcaagtctgtaaagtgaaagcaagtttattaagaaagcagagggccgggcgtggtggcycacgcctgtaatcccagcactttgggaggctgaagcaggcggatcacgaggtcaggagatcgagaccatggtgaaaccccgtctctact

SEQ ID NO: 1184 - DNA, 179 bp, Homo sapiens
tagaactagaaataccatttgacccagccatcccattactgggtatatacggaaaagattataaattgtgctactataaagacacatgcrcacgtaagtttactgtggcactattcacaatagcaaagacttggaaccaatccaaatgtccatcaatgatagaccagattaagaaaatg

SEQ ID NO: 1185 - DNA, 179 bp, Homo sapiens
tttgaggagtcaaaagatatatgtggattttctactgcacaggggattggcactccaacccctgtgttgttcagaggtcaactgtatatrtatgttgttgaggagaaataataataattttaattaaggaagactaaataagcttgaaagcctcattgttttctttgtatgaaatagca

SEQ ID NO: 1186 - DNA, 179 bp, Homo sapiens
catacatatatatacatgcatatatatatacacatatatacacaaacatatatatacacacacatatacatatatacatacatatatacrtacatatatatacatacatatatacgtacatatatatacatacatatatatgtacatacatatatatatgtacatacatacatttaaac

SEQ ID NO: 1187 - DNA, 179 bp, Homo sapiens
tctggaactaactaccttttgctttctgtcctctggcttcacaccttaagttaggacagatctagcttaaagtctttcctccaatctgastttttttttttttttttttttttttttttgagacggagtctcgctctgttgcccaggctggagtgcagtggcgccatctcggctcactg

SEQ ID NO: 1188 - DNA, 179 bp, Homo sapiens
ttcattagggaactgcaaattttaaaagcaatgagacaccactatacactgattagaacggtgaaatccaaaccatcttcaatgcaaatrctggtgaggttatggagcaacaggaactttcattcattactagtgggaatgcaaaatggtatagctactttagaagacatattgatggt

SEQ ID NO: 1189 - DNA, 179 bp, Homo sapiens
gacctcaggtgatccaccagcgtgggcctcccaaagtgctgagattacaggcatgaggcacagcacctggccaaaggtggcattttaaawatcttttttattgtacatatttaaagtgtaaaatacgatgttttaatatacatatacttaatgtaatgattattgcagtaaagcaacta

SEQ ID NO: 1190 - DNA, 179 bp, Homo sapiens
atgacccaactgaaacatgggcaaatgatctgaagacaccaaagaagatatgcagatgccaagtaagtatgtgaaaaaagttcaatatcwtatttcattagggaactgcaaattttaaaagcaatgagacaccactatacactgattagaacggtgaaatccaaaccatcttcaatgca

SEQ ID NO: 1191 - DNA, 179 bp, Homo sapiens
tgagatatttgggaggacaagagcaggggcctccgttaatacctttttcaggtttagaaaagcctgttcttctttgtcagtccaaactarcgggccattaactccagtagcggtataaaggggcttggtgatttccgcgaaccctaatatccataggtgactgtcccacagcccccggg

SEQ ID NO: 1192 - DNA, 179 bp, Homo sapiens
gtcatagattcttttatctaatgtttaatatttcccacttttgttgaatttttctttttttaatattaatttgtatgagttatttatatrtcctggatacaagtccttcatcagatgcatattttctgaacatttttttcaagtttgtgacttccctattctttttcataatggtgtct

SEQ ID NO: 1193 - DNA, 179 bp, Homo sapiens
cagtcattatattaaaattcttcatcgttcaatataggctctcttctatctcctttcactgtatgacttttctggagaacttcattaagkttcttggtttcaaataccacttacatgctagtgattcacaaatttgtatctctaactttctctgagttccaaagatagaaggtggatac

SEQ ID NO: 1194 - DNA, 179 bp, Homo sapiens
ttgtatttgttttattatatattatctcattcattgtaatctttatattcataattttcaagtgtgagtatctattaaaatcacaaacarttttaacaatcataaaatattcggtctaacatttttttattatatgagtcatgtctgttttatccgtggagtacttggattaagcccta

SEQ ID NO: 1195 - DNA, 179 bp, Homo sapiens
catgaatgaagaaggaaacaaatggaaataaacaaaatgaaggtaaataccctatatgttaaaagaaaaaaataccctatatgttaaaaraaaaaagaaaagagaaggaagagacacaaggaaagaaagagagaagcaaagaggttaggaatagggtaagagaaaaggaaaaacagcaa

SEQ ID NO: 1196 - DNA, 179 bp, Homo sapiens
caaggtcaagagttcgagaccagcctggccaatgtggtgaaaccccgactctaccaaaaatacaaaaaaaaattagcgaggcgtggtggygcatgcctgtaatcccagctactcaggaggccgaggcagaagaattgcttgaacccaggaggtggaggttgcagtgagctgaaatcgcg

SEQ ID NO: 1197 - DNA, 179 bp, Homo sapiens
gaatggagaagtatgcagctgttcaacttttttttttttgagatggagtctcgctctgtcgcccaggctagagtgcagtggctcgatctyggctcactgcaagctctgcctcccgggctcatgccattctcctgcctcagcctccagagtagctgggactacaggcatctgccaccaca

SEQ ID NO: 1198 - DNA, 179 bp, Homo sapiens
ggggaataacgtggctggggccgggtcgggccggggatgggtcagcgatcactacaaggggcccgactggcttgattcgggcgtcacggktgcctagtgttgttctagagagggtagcttttcttttatcacgaccctcgcatggggcgagggaaatggccgagcatggctgaggccgc

SEQ ID NO: 1199 - DNA, 179 bp, Homo sapiens
cttgatttttcttggggcaggaatccttttaagaatttgttgaagctaaagactgtctctccagaaaaacgcatgtacacacacacacgyacacacacacacatgcacaagcacacacatgtatgtatgaatgtacacatgcttttttccacacacagttttatggcattctgagggct

SEQ ID NO: 1200 - DNA, 179 bp, Homo sapiens
gcagactgccatcttctggtgccatttactattcaagttgctttggtgtttttttgtttttgttttttttttttttttttttttacaacyaagtggattgattgaaatgctttgattcttcatttgaaatgtttctattccatatacccattatcttttatcctcacaaaagcccttaa

SEQ ID NO: 1201 - DNA, 179 bp, Homo sapiens
tcaaatcccagcactttgggaggccgaggtgggaggatcgcttgaagcctggagttcaagaccagcctgggcgtcatagtgagacccctratctctacaataataataataataaaatgtaaaaagtcctcaacttttccggcacagcacaggaaaggttaacgccgggaagaaaaaat

SEQ ID NO: 1202 - DNA, 179 bp, Homo sapiens
cagggtcacctgcagatcccattcccatcagggcagcctggctccccctgttctatgagctctggggcaccctcatacccacctctgccrgaagtccccgtagaggatgcggttggggaagcccttcctgcagatgcggatgccctccagcacgccattgcagcgcagctggtgcatga

SEQ ID NO: 1203 - DNA, 179 bp, Homo sapiens
ccacacccttgccctggagaggcgagggatatggtgaaggtggggatatgcccacagcagtgcttgtgaaagacctgacccagagatgcyacagatgtagagacagagctgagaagagccagttgtggcaagaggccatgggccggataagggggctgtgctccagcctgactcaggca

SEQ ID NO: 1204 - DNA, 179 bp, Homo sapiens
ggccgtggctgggctgggtgtgggtcagacaatccgggctctggcctatgctgacaaagagcagaggttcactgagagcaagtcagcccyagcctatggggcctcccgcctgcggccttgtctcttctgaggaatgcccataagcaagagggctggagactggcttatttctcaaccaa

SEQ ID NO: 1205 - DNA, 179 bp, Homo sapiens
tggctgttaacagtgggctgcttggacacgcgtgtgcatgtgcacgcatgctggtgtgcatgctgggctgcctggcaaatctggtggtgrtgggattcctcaaggagaaaacattccctcttgcaatggcaagaactaggggcagttctctgtccctcctcccaacccctcctttcccc

SEQ ID NO: 1206 - DNA, 179 bp, Homo sapiens
atccatctatcgctttagatagcccaaaatttaatcctgtattaaaccaaatcatcatagagcagcatatttgggctaaattgtgatgarcctagtagaacacacttaggaccttctgaatctattagaaggtcctaagtgtgttaggacaaatgacaccttcaataaagttgggcaac

SEQ ID NO: 1207 - DNA, 179 bp, Homo sapiens
cggaagctgaggagggaggattgcttgagccaggagtttgagggtgtggtcggctgtgatcatgccactgtattccagcctgggcgacarcgaccctgtctcaaacaacaaaggcagcaaaataaacaagtaaataaataaataatgattgtggaaaatttgtagaacatagaaaatta

SEQ ID NO: 1208 - DNA, 179 bp, Homo sapiens
ggaagctgaggagggaggattgcttgagccaggagtttgagggtgtggtcggctgtgatcatgccactgtattccagcctgggcgacaamgaccctgtctcaaacaacaaaggcagcaaaataaacaagtaaataaataaataatgattgtggaaaatttgtagaacatagaaaattat

SEQ ID NO: 1209 - DNA, 179 bp, Homo sapiens
tctcacaccattacataccaaatttcaaaaaattcattctcagaggaaaacttatctctttgatattctctatgcatcaacaacaggcargataataaatacgagtattcattcatttatttttttacttttttaaaaaaataagattattcattactgaagatgactcattcagttat

SEQ ID NO: 1210 - DNA, 179 bp, Homo sapiens
aactctgttatatctgaagccttaacccacctctcaaattgcagtattttctaaaatctcatgtcagtgttatccaccacatattttagsatttggtcatttattctactttctgttatgggttaggcatttgaggtctatcttttctcctaactagattcacctaaaatagtgccgtg

SEQ ID NO: 1211 - DNA, 179 bp, Homo sapiens
tgaactcctggactcaagcaatctggctcccaaagtgttgtgagccactccgcctggccttaagaatctcaccattttaaaagcttttgrtatatactgccaaagaatagaaagattgtactggttcttgctccttttttcctcccatgcctaagtttttaaaaaaaatcagatatagt

SEQ ID NO: 1212 - DNA, 179 bp, Homo sapiens
ttcaaccaaagccattcattagggatttgatttggaggcaggagggattcctatactgttttaagtgtgtattaattctttcaatttatygaatatttagtgagtacctgctatgcactaggcactattctcggttgtgggtacagcagggaacagcacagaccaaaatctttgccttc

SEQ ID NO: 1213 - DNA, 179 bp, Homo sapiens
catcctctaaccctacccccctctaaacataaacacaaacacacacacacacacacacacacacacacacacacacacacacacacacasagctctgggcacagatagacatggcatatctaggccccacaactctcaatctactcacatcatccacttgctgctccagcttgactttg

SEQ ID NO: 1214 - DNA, 179 bp, Homo sapiens
gccgtggctgggctgggtgtgggtcagacaatccgggctctggcctatgctgacaaagagcagaggttcactgagagcaagtcagccccrgcctatggggcctcccgcctgcggccttgtctcttctgaggaatgcccataagcaagagggctggagactggcttatttctcaaccaac

SEQ ID NO: 1215 - DNA, 179 bp, Homo sapiens
cgtttttctgttttgaactctggaactcatcctgaatgtcacatttgtacctgttctttgtgtggaagctctaaagtggcctttagccamaagtcaatcaaaagttttgagcaagatcctaatatagttgatgactgatgcagcccttgagctgacagctggtgtagcatggatggctg

SEQ ID NO: 1216 - DNA, 179 bp, Homo sapiens
acatggaggccagtcccctgaggggacctcccgcccccatgtaccttcagcaagctctggaggctcttgacttgcttctgggcctcggcrgccatgcggttggcgtggctgagctggatctccatctcattgaggtctccttccatcttcttcttcaccctcaggacctcgttgcggct

SEQ ID NO: 1217 - DNA, 179 bp, Homo sapiens
gggtttaagggcctaagggatggtccttgtggctcctaactccccaccttcatctgcctccaggaaaatctcaacaagctaatgaccaayctgaggaccacccatcctcactttgtgcgttgcatcatccccaatgagcggaaggctccaggtgagccaggagaagaccttagtctggg

SEQ ID NO: 1218 - DNA, 179 bp, Homo sapiens
tagaaggtctctaagctcctcgcactcagacattatctgatcaccggcccctccgttcctcctgaccccccatctatttgatccctcagrtgtatgtggtgccgcccccagctcggccctgtccaacctcaggacctccagctggaccttgcccaccctctcctgacctcatctacaaa

SEQ ID NO: 1219 - DNA, 179 bp, Homo sapiens
agagaaaaatgatcaaatatatactacactttgttacctgatttcataccctttctccagaaagaattaaaggtggtcattttttttttwaaacaacaagcccacttttagactattgatcgttttgtacctgctttcccttttcctatgaaagtgcatacattctagacattgtatct

SEQ ID NO: 1220 - DNA, 179 bp, Homo sapiens
agcatctgccttctctcttggcatggaatcaaaggctctggtccttgtcagggggctttcaggcatctgggggtggggaaagcattatgrggcagggggctcctcttggtccctgtggagtcgggtctctgtgggcacaactccaggggctggcattcacactgtacctatgaattact

SEQ ID NO: 1221 - DNA, 179 bp, Homo sapiens
gtggggatgggtgaatgagctggagatgggctatgggattctcagcctctcaacctgaggttccagctccctgtccctgaggcacccatrcctcatgcatattcctgcaacagccttcccaagggtatcctgcaactgccttgcactcttctcaaacatgtccagcactcagagtcctt

SEQ ID NO: 1222 - DNA, 179 bp, Homo sapiens
ggttgcagtgagccgagactgcgtcactgcactctggcctagcgacagagtgagactctgtctcaaaaaaaaaaaaagaagaagaagaarcagaatgtaactcagatggtcttcttaaggaaggatttccccacccaaggagaaacgcagggcttttcccaagctcttccctttaactg

SEQ ID NO: 1223 - DNA, 179 bp, Homo sapiens
agagctgagctgggagtggtggctcacgcctgtaatcccgtactttgggaggctgaggcgagtggatcacaaggtcaggagttcaagacyagcctggccaacatggtgaaaccgcatctctactaaaatataaaaattagctagacatggtagcacatgcctataatcccagctacttg

SEQ ID NO: 1224 - DNA, 179 bp, Homo sapiens
tttgatgtgctgggcttcacttcagaggagaaaaactccatgtataagctgacaggcgccatcatgcactttggaaacatgaagttcaarctgaagcagcgggaggagcaggcggagccagacggcactgaaggtgggaggcagggattcttgggggcagctgtcaagtcatggagggc

SEQ ID NO: 1225 - DNA, 179 bp, Homo sapiens
ccgaggcccagaagcaagtcaagagcctccagagcttgctgaaggtacatgggggcgggaggtcccctcaggggactggcctccatgtgscctggagaagcagtggtgtctggatacaggcaccagattcctcctgcccctgggttactgcagggacctctgacaggtgccctcagtga

SEQ ID NO: 1226 - DNA, 179 bp, Homo sapiens
tgtcctgagcatcaggagagtgggtgtgagcagaagccagcctcggtgcccttcactgagggcacctgtcagaggtccctgcagtaaccyaggggcaggaggaatctggtgcctgtatccagacaccactgcttctccaggccacatggaggccagtcccctgaggggacctcccgccc

SEQ ID NO: 1227 - DNA, 179 bp, Homo sapiens
tctgacaggtgccctcagtgaagggcaccgaggctggcttctgctcacacccactctcctgatgctcaggacacccagatccagctggaygatgcggtccgtgccaacgacgacctgaaggagaacatcgccatcgtggagcggcgcaacaacctgctgcaggctgagctggaggagct

SEQ ID NO: 1228 - DNA, 179 bp, Homo sapiens
cctggacccaaggccttgtttctgtctttaggggaggcggaaggtgggcggtcacttacatccgtgatggccttcttggccttctcctcrgcgtttctgcactcctgcactgcctcctccacttccgactggagctgggtcagatccgactccatcttcttcttctggttgatgaggct

SEQ ID NO: 1229 - DNA, 179 bp, Homo sapiens
ccatctgccagcttccaggtcagaaccagccctagttacttgatagggctttccacaaagcagaatactgcttctgtgggaataaaattkaaaatttaaaattgaaaattgaaagttagctgggcctggtggtacataactgtagtctcagctacttggagggctgaggtgggcagatt

SEQ ID NO: 1230 - DNA, 179 bp, Homo sapiens
cttctgtccacaaatcactctgtggttctgtatctgtaacctctttcttgtgcctctggtatccatctatcaaatggactgacaccctcrtctccttggccttttcttcccaggtacactgaaaataacgggccaagggcacagctctcagctatgcaagtggaggttttagagcattc

SEQ ID NO: 1231 - DNA, 179 bp, Homo sapiens
ctcaaaacagccccccactgactggaacttctgcagagatccccagttccatccccctaaaccacaagtgcctctaacgtgggaccacargatccctggggccctgcctctccctccaagggcatctcccttaggcctctgaaagccccagggatttgtccccacacacttctccctct

SEQ ID NO: 1232 - DNA, 179 bp, Homo sapiens
tcaaccacacaagggtggagagggagaaatttcaaaagtgaagaaaacaatggcatcaaaatggtgagccagtccaagatgctacgagayagaattttggtgccgaagttgaagccactctccacctaccccacccctgaggctgcaatgattaaaggtgtcctaggacacccattctt

SEQ ID NO: 1233 - DNA, 179 bp, Homo sapiens
ccgaggagcccagcatggcctggctcagcagctccatcccagctgacgtgctatctcctgtcgctgatgtgtgtgtgttcccgccctgaratacaatccttcttctggagcgctccttccagctgcaggccccagctcccaagtcctgcccgaaccctggatcttgaactctggtcaga

SEQ ID NO: 1234 - DNA, 179 bp, Homo sapiens
tcagctggtccaatgccctcatttcacataagagaaaacaggcccagccaggggaggtgaactcatttgtgacagagctagggccagaaygcagctcttctgacacctaagcgagtgttctggatactgtactgagcctccttgtagctcagaaaagaatggccaactcttccctccac

SEQ ID NO: 1235 - DNA, 179 bp, Homo sapiens
gagggagagatttcccaaaatgcgaatgctgggagagccgttgattatcagctggtccaatgccctcatttcacataagagaaaacaggyccagccaggggaggtgaactcatttgtgacagagctagggccagaacgcagctcttctgacacctaagcgagtgttctggatactgtac

SEQ ID NO: 1236 - DNA, 179 bp, Homo sapiens
tagagaatggggcacagggagtccctcccacctcctggtgcccccccccctccccaggcgaagaacgccctggcccatgcactgcagtcrgcccggcatgactgcgacctgctgcgggagcagtacgaggaggagacagaggccaaggccgagctgcagcgcgtcctgtccaaggccaa

SEQ ID NO: 1237 - DNA, 179 bp, Homo sapiens
ggaatgcagcagctgcacccgctcactagtctcaatcagctcctgctccgccagcttccgggaccgctctgtctgctccaccacggcacscaactcctccagctcagcctgcagcaggttgttgcgccgctccacgatggcgatgttctccttcaggtcgtcgttggcacggactgcat

SEQ ID NO: 1238 - DNA, 179 bp, Homo sapiens
cgtgacattggcacgaaggtgggtccctcttttgggctttgctagtcacccccacagcaggcatacccagacagagcaccctcaaacccrggatgcttccttttcatttattccacacacttgagccacatggccccagaggccaaggtaatgcagttctctgtgatttcaaggattct

SEQ ID NO: 1239 - DNA, 179 bp, Homo sapiens
tacatcagtgcccttagctctccctctacttgcccttccttcttatatctttccacattctagttctcctcctcctcctcctcctcctcytcttcttcttcttcttcttcttcttcttcttcttcttcttcttcttcttcttcttcttcttcttcttcttcttcttcttcttcttcttc

SEQ ID NO: 1240 - DNA, 179 bp, Homo sapiens
atgtacatatcaccgtgctcagttaacttaaaaaatgaaactttttattttgagataattgtagatttgcattcagtgaatcttacaacmaagtacagttgtaagaaataataaggagagatcctatgtatcttttgcccagtttcctccattggtaacatgctacacaattatattat

SEQ ID NO: 1241 - DNA, 179 bp, Homo sapiens
tgtgagtaaagaatcacagcccctctttacatccttgctggcatttggcccctgggtgagggccttcaatgtggctgcctcagtttcttyacccagttccatcccactgagtctgtaaaccttggggtacaacctgacattgaagtggtggggtgtagcaattgacctggctcagaacc

SEQ ID NO: 1242 - DNA, 179 bp, Homo sapiens
tgatgaggctggtgttctagacatggagagagaaaaatgatcaaatatatactacactttgttacctgatttcataccctttctccagaragaattaaaggtggtcattttttttttaaaacaacaagcccacttttagactattgatcgttttgtacctgctttcccttttcctatga

SEQ ID NO: 1243 - DNA, 179 bp, Homo sapiens
aggggctgccacataatttgtgacgtgagttcaggcttttgtggaatctacacactaaaaaacgactacgtagccctagcttctttcctyatcaaactcaagcatcagaataggtggtgcagccagaagtctctgggctgggccattccaccaggtgtcctggcacccctgggcccttc

SEQ ID NO: 1244 - DNA, 179 bp, Homo sapiens
tgcacccctggcccccaggacttcctgcgctgtgtcagtgccatcatcatcttcctggtggtctcctttgcagctgtgacctcccgggayggagctgccattgctgcttttgtgagttcagccctgcaggactccttagcccctcaagagctcaggctggtgcttgcacactttctgta

SEQ ID NO: 1245 - DNA, 179 bp, Homo sapiens
gctcctccttgcagagcccagacttttggaaacctcaagcctccaagcggaaggggaagggtgggatgcaaaggggctgtctactacccrtgtcctaccttcctctctccagcttgtgaggaccccccagcagtgctcttagaagtgcagggcaccttacagaggcccctggtccggga

SEQ ID NO: 1246 - DNA, 179 bp, Homo sapiens
aattgaagtacaaactcaagaagcagttttcacactccctccctctggtcaacatccagtagacatttttgggattagaagctaatacawcatattagagactaaaatgcaaaatcttctaaagtggtatagaccacatgggtgtgagatcttttatacttgaaatttttccaagtcag

SEQ ID NO: 1247 - DNA, 179 bp, Homo sapiens
ttgagacagagtctcactctgtcacccaggctggagtgcagtggcatgatcttagctcactgcaacctccgcctcctgggtccaaacaaytctcctgcctcggcctcccgagtagctgggactacaggaacgtaccaccatgtctggctaatttttgtatttttagtacagacagggtt

SEQ ID NO: 1248 - DNA, 179 bp, Homo sapiens
ctaaatggctggctctaaaagatccccataaattgttgggtattggagggtgaatcatgttttgacccttctctggtttagttttccatrttcagtcaattctaccatatcttgtctgttctctctattcctactttcactgcttgagtaactccccatcatcattgcaggggtcctgg

SEQ ID NO: 1249 - DNA, 179 bp, Homo sapiens
ctttccaaggtgctaagattgctgctctccaatgctaactttctgacacagtgctctagaaccctgcctgtggtcctgagcactgatcascttagctagaccatggttgactcttcttggagattttcacttggtcctagaatgtggcaacgtagttgtgctcgccagaacgtgggacc

SEQ ID NO: 1250 - DNA, 179 bp, Homo sapiens
actacaggcacatgccaccacaccaggctaatttttgaccatgttggccaggctagtcttgaactcctgacctcaggtgatccacctgcytcagcctcccaaagtgctgggataacaggtgtgagccaccctgcctggccagtgacttgtttctaatggagtctggcagcagtgacagt

SEQ ID NO: 1251 - DNA, 179 bp, Homo sapiens
atcagtgcccttagctctccctctacttgcccttccttcttatatctttccacattctagttctcctcctcctcctcctcctcctcttcytcttcttcttcttcttcttcttcttcttcttcttcttcttcttcttcttcttcttcttcttcttcttcttcttcttcttcttcttcctt

SEQ ID NO: 1252 - DNA, 179 bp, Homo sapiens
agaaagagagaaagagagaaagaaagagaaagagagaaagaaagagagaaagagagaaagagagaaagagagaaagaaagaaagaaagaragaaagaaagaaagaaagaaagaaagaaagaaagaaagaaagagaaaggagaaaggcaggcacaggagagatgactgctcttcctcacc

SEQ ID NO: 1253 - DNA, 179 bp, Homo sapiens
tagacagtatagggtaattccgtttttaaggaactgtctggcaaatgctcaaatgtgcattggaaagagccaaatgtgagtcctagaaaktcaccttgcctggcctaggctggtggacagagcccaagattggggccttgatcctgatggtggaaggagccgtttgggagtctgggtca

SEQ ID NO: 1254 - DNA, 179 bp, Homo sapiens
ggcatgagccaccatggtaggccttactttagttatttaaggaatctccacactgttttccctagtggctgtactagtttacattaccaycagtagtgtagaagtgttctctgatcaccgtatccatgccaacatctacagttttttgattttttgattatagccattcttgcaggagt

SEQ ID NO: 1255 - DNA, 179 bp, Homo sapiens
atagtaggaggtcttcaactccttccccctgcctcctctcccctgctttaaaacaccaattgtaatttcagcttccaggttgttctcccragatggctcactcccctgactgaaggaagacagctactccccagcccactgccactcacactcctgagcaccacccctaggtcagcagc

SEQ ID NO: 1256 - DNA, 179 bp, Homo sapiens
agtgacttgtccgtaaacctggagtcactgatacctcggtccagccctgcacccatcctcttcctgtttaatgtaggccagttagtcaamgctcacattagtggggacacctggggatagaggctccaaagcctcattttgatacctcacaacccttgggcagttgttctagaaagagg

SEQ ID NO: 1257 - DNA, 179 bp, Homo sapiens
aaactcatctctattattgatcataccagtgagattagatacataattcagaattgatcaccacctctgacttttcattccccagctccyttctagaaagatatcagaaaagttaacatcctctaaccctacccccctctaaacataaacacaaacacacacacacacacacacacaca

SEQ ID NO: 1258 - DNA, 179 bp, Homo sapiens
agacattgactgggtctccacggcctccatatggcatcccccgccggtccaggatgtataagcaggcatccagcaccccgtggtcaaacyggaaggagggatggagggcagaggtgacagcctgaaccctaggccagcaccctgctccaataccccagcccccacacccaccccagctc

SEQ ID NO: 1259 - DNA, 179 bp, Homo sapiens
attatttaatagtcctgaaaggaacatctccgggatagatgtggttttgggtgtggagggagtgtgggaaggaggttaaaggtaatggamtgatcagtaatcagcaaaggctctgggtttggaaggaaaagagattaattcctcaaattaccagatttcatgtgctttggtgtatgatg

SEQ ID NO: 1260 - DNA, 179 bp, Homo sapiens
gggaggctggggtgttaggattgcttgagcttaggagtttgagaccagcctgggcaacataaggagaccctatctctgtaaaaaacacamaaaaaaaaaattagccaggtatagtggcatgcacctgtgatcttagctacttgtgaggctgaggttggaggatcgcttgagctcaggag

SEQ ID NO: 1261 - DNA, 179 bp, Homo sapiens
acattaaaaagtcaggaaacaatagaagctggagaggatgtggagaaataggaaggcttttagactgttggtgggagtgtaaattagttyaaccattgtggaagacactgtggccattcctcaaggatctagaaccagaaataccaattgatccagcaaccccattactggatatctac

SEQ ID NO: 1262 - DNA, 179 bp, Homo sapiens
tgaggggcttcacgagaggccacagggcctggctggccacgctgtcccggcctgctcaccatctcagtgaggggcaggagctggggctcrcttaggctgggtccacgcttccctggtgccagcacccctcaagcctgtctcaccagtggcctgccctctcgctcccccacccagcccac

SEQ ID NO: 1263 - DNA, 179 bp, Homo sapiens
ggctatgagtgtgatggaatttcctgggctgcaatgcaggccaggaaaacactgacttaatctaagttaaggacaaagtgtgcttagagrgatagtgacatcctggattggaaaagaaacaaattctaattcagagtctgattctagaaaacacctcagaaagctagagtccacactgc

SEQ ID NO: 1264 - DNA, 179 bp, Homo sapiens
agctgggactacaggcacaccaccacacctggctaatttgttgtacttttttgtggcccaggttggtctcaaactcctgagctcaagcartctgcccaccttggcctcccaaagtgttgggattacaggcatgagccactgtgccgagcaggaatacatttagtgtgggtttagtaggt

SEQ ID NO: 1265 - DNA, 179 bp, Homo sapiens
gggtcccaactcacgtcgaagatctcgaagccagcgatgtccaggactcctatgaagtactggcgtggctgcttggtctccagggtggcyttgatgcgcgtcaccatccagttgaacatcttctcatacactgccttggccagagccccgatggagtagtacacctgctgcacgctctg

SEQ ID NO: 1266 - DNA, 179 bp, Homo sapiens
gtcattcattcactccacaaatcttcactgaatgcctactatgtgccaggctctgtcctaggctctggggatgggacagtgaacaaaacrgacaaagcgggggatgagaacagggaccaaaagcctggagctcagctccctgcaccccgtgccctgcacacacacacacctcggcctcc

SEQ ID NO: 1267 - DNA, 179 bp, Homo sapiens
ggctgaaattcccagaaccactgaaacttagagctgagctgggagtggtggctcacgcctgtaatcccgtactttgggaggctgaggcgrgtggatcacaaggtcaggagttcaagaccagcctggccaacatggtgaaaccgcatctctactaaaatataaaaattagctagacatgg

SEQ ID NO: 1268 - DNA, 179 bp, Homo sapiens
ccaccaacagctacgggaaactgatatccctcaattgagtcaggcatcaaggcttagcacccagcaggtgctggattggtttgactctcrattacctcagccagctgaggtggtagtttgtctagatgaagaagaggaagaggaggaggaagaactgccagaagatgatgaggaagagg

SEQ ID NO: 1269 - DNA, 179 bp, Homo sapiens
ctaatattcagaatctacaaagaacttaaataaatttacaagaaaaaaaataaccccatcaaaaagtgggtaaaaagtatgaacagaaamttctcaaaagaagacatttacacagccaacagacatatgaataaatgctcatcatcactggtcatcagagaaatgcaaagcaaaaccac

SEQ ID NO: 1270 - DNA, 179 bp, Homo sapiens
ggagaatcgcttgaacccaggaggcggaggttgcagtgagccgagatggcgccactgcactccagccctggcgacagagtgagactctgyttcaaaaaacaacaacaacaacaacaaaaagcaaaaaaaccccaaacaacaacaacaaacaaacacacatttaatggggtttattattg

SEQ ID NO: 1271 - DNA, 179 bp, Homo sapiens
cagtccctacatcccctagccgtgcccgggcaaggccatctcgtgcctccctagttcattttctctcctccttctcacaccctgcctccygtccagggatgcagcagaagcagagggcctcagcctggggagtagatggcatgtggcagggtttgggctgtgatttctttttagaattc

SEQ ID NO: 1272 - DNA, 179 bp, Homo sapiens
tggcctcccaaagttctgggattacaggtgtaagccactgagcacctggcgctttttcagtgttgtcttttttttttttctttttgtgaygaagtttcgcttctgttgcccagggtggagtgcaatggcacaatctcggctcactgcaacctccgcctaccaggttctagcaattctcc

SEQ ID NO: 1273 - DNA, 179 bp, Homo sapiens
aataactcaaaacaaaggtgccactcatcccttttggagtgttctgttttctttttgaagtttcaagagttataggcagattcttcttcrgtctaaagttctgctctcctgtattgcattacctgatctctttggctttgggggataccaaagattactttgcgctgtgtgaggatttt

SEQ ID NO: 1274 - DNA, 179 bp, Homo sapiens
tttgtatatacttagtgcaagcgcaaatttcttacttgcatatgttgcatagaggtgaagcttgggcttttagtgtacccatcacccaartagtaaccattgtacccaataggtaatttttcaaccctcactcccctcccacctcccgacctattggagttttcagtgtctattattct

SEQ ID NO: 1275 - DNA, 179 bp, Homo sapiens
catagcgagacctcgcctctacaaataaatatataaattttaaaaattgaaaaaaaaattctctctctctctctgagacagtataacacscttctttccccttgggctttccatatccctggacagatggaagacaagaacggactgtcttaaacttccagtttctgtgtttacacagt

SEQ ID NO: 1276 - DNA, 179 bp, Homo sapiens
ttggacagaatctggtagaagatgtggtagtttctctcagctttcagctggaagatcacccgggacttctccagcaggtctgaggtgggyggaggggaggaaggcaggtgaggaaggaaagagagtagagccagaaaaaggtggccatgggggcagagggcagggggcacccacagctt

SEQ ID NO: 1277 - DNA, 179 bp, Homo sapiens
cttaacctggaataaggataaattttgtagttccacaggtgacactagaagctagaaactctaggccagcaggactttacacagagacartcccacagctatgatggaagcacagaaagttgtgatgttgcctctcctcctccctgggtccagcagggaagaaaggaagggttcctagc

SEQ ID NO: 1278 - DNA, 179 bp, Homo sapiens
ttgcttgagcctgggaggtggaggttgcagtgagtcgagattgtgcactgcaccacagcctgggtgacagagaccctgtctcaaaaagaraagaaaaaagcaaaaaagcacctacccagcaagtttatgactaaatgaaaaagtgcacttgacattataactagaacaaagtaagggct

SEQ ID NO: 1279 - DNA, 179 bp, Homo sapiens
aggcactcctcgcagtcacccaacactgggctgaacaaagcccctcccagtttcatcagctgtttccaaagatgtccactgtgcttgccrgtgaactattgtcagctctttggaattctctcttctcagatccttcattgacactgccccattacttctgtcttcttttcacacagatg

SEQ ID NO: 1280 - DNA, 179 bp, Homo sapiens
ttggggtttcccagtttggggtggatctggctacacttcattttctgcctccatcgagactccctattgtttctttgaggttccattagrtcaaggcaaacacttctcttgttctcccaacatgtagcaaaatgtcacaattctttttggctccgttgttcattagccactccatttcg

SEQ ID NO: 1281 - DNA, 179 bp, Homo sapiens
tgccaacactcaaaaagactttgaatttgatgtcagaataggaataggcttgccactctcaccagcctcccaagaagagtcattgggcargctggatggctagaaaaagaagatacctgtctgacgcccaaaggcagctagaaggcatcctggcttcaggaacagtgccatcacctggc

SEQ ID NO: 1282 - DNA, 179 bp, Homo sapiens
ctttcccactgactccctgtttgtagtttttttgaacttataaataaagtatctctaaacataagtacacatggcttctttttattttgratgatttcaatagaacaaattctaggagacgaattccttagtcaaaaattatgaatatgtttacatatagccactctttgaaagcatta

SEQ ID NO: 1283 - DNA, 179 bp, Homo sapiens
ctgagacctccttcctgttgggtcttaggtgaggctgtttcagtttccctcctcttccttgcttcaccttctcatttgtgcaatggggayactcacccacagcttcttccatcagaccttgcccatccagccaacaaacttaggaagtcagggtcttccagcagccctgtgagggtagg

SEQ ID NO: 1284 - DNA, 179 bp, Homo sapiens
actgagcccctctcttgtgtcttttctctcaggagtcatgtcagccattgagttggtgcctgaacaccaaacagtgcctgtgtcaatagkggtccctgccaccctcaggtgctccatgaaaggagaagcgatcggtaactactatatcaactggtacaggaagacccaaggtaacacaa

SEQ ID NO: 1285 - DNA, 179 bp, Homo sapiens
gtgtaaaatcatatgaggtatgtacagttaattccattttacagatgagaaaactgaggcagagagagattaaagattttgcccaacgcygcagtgaaagtcctcaagctgtgttccaactcaggcctgtttgactctggaaccccacactcctacccactgtctaagtggttattatt

SEQ ID NO: 1286 - DNA, 179 bp, Homo sapiens
ttctcacccctccattctggccagggactgtgactgtctgatcaatggagtacagctatgtgactttcaaggctaggtcataaaaaggargtagattctgcttggagctctctctctgtctgttgatacttgccacgttgtaaggaagcccaagcctcatggagcagtcatgtgtatac

SEQ ID NO: 1287 - DNA, 179 bp, Homo sapiens
tgttgttgcccaggctggagtgcagtggcgtgatcttggctagctacagcctccacctcccagccgcctgccttggcctcccaaagtgcygagattgcagcctctgcccggctgccaccccgtctgggatgtgaggagcgtctctgcctggctgcccatcgtctgggatgtgaggagcc

SEQ ID NO: 1288 - DNA, 179 bp, Homo sapiens
caccttgggccgagcgcagtggctcatgcctgtaatgccaacaccttgggaggccaaggtgggcagatggtttgagcccaggagtttgargccagcctgggcaacatggtgaaactgtctctacaaataataataataataataataataataataataataatacaaaatattagctg

SEQ ID NO: 1289 - DNA, 179 bp, Homo sapiens
attattgtacatgtaacataacttgtctgataaagttatacatataacttgactggtgaaagagaaaaacgttaaaaaaaaaaaacccamaaaaagccacacaacagacaaaaaaaaaaaaaaaaaaaaatcaaagcagcccttcctcataaactgcgctttgatcccagcttctataa

SEQ ID NO: 1290 - DNA, 179 bp, Homo sapiens
ggtgggcgcctatagtcccagctacttgggagattgagacaggagaagggcatgaacccaggaggcggaggttgcagtgaactgagatcrggccactgccctccagcccaggtgacagagcaagactccgtctcaaaaaaaaaaaaaaaaaaaaagtttgtgcagggccgggcgcggtg

SEQ ID NO: 1291 - DNA, 179 bp, Homo sapiens
taagaggcaagtaaagagaggttcgactgtgaaagaacgaagggaggcagtaaatgcaaatcttttctaagcagtgtgagggaaagagarcagctaaggtccaagatgctaaccctcaactgtcactttctttttttttgagaaggagtctcgctctgttgccaggcctggagtgcagt

SEQ ID NO: 1292 - DNA, 179 bp, Homo sapiens
ggtgcacttataattgtagttacttgggaggctgaggcaggagaatcgcttgaacccaggaggcggaggttgcggtgagccaagatagcrccattgaactccagcctgggcaacaagagcgaaactccttctcaaaaaaaaaaaaaaagaaaaaaaaggaaacaaatattttaaaattt

SEQ ID NO: 1293 - DNA, 179 bp, Homo sapiens
tgagccaccataccctgcccaggctaatattaattaagctctaccacatgccaggcactttaaatatattatctcaaaaggctgggcgcrgtgggtcatacctgtaatcccagcactttgggaggccaaggtcagcagatcacttgatgtcaggagttcaagaacagcttggccaatat

SEQ ID NO: 1294 - DNA, 179 bp, Homo sapiens
tggccaggttggtcttgaactccagacctcaaatgatccacccacctcagcctcccaaagtgctgggattacaggcgtgagccaccacasccggcctcaatgaaatcttcagcagccattaaaatcagtgttgtcaaagaaaatgtagtaacatggagaaagtcttatgacatgccatt

SEQ ID NO: 1295 - DNA, 179 bp, Homo sapiens
tttttttttttttttttttgagacacctctgcctctcaggctcaagtgattctcctgcttcagcctcccaagcagctgggattacaggcrcacgccactactgcccggctaatttttgtattttcagtagagacggggtttcaccatgttggccaggttggtcttgaactccagacctc

SEQ ID NO: 1296 - DNA, 179 bp, Homo sapiens
aaatgtgagaaactgacataaagaaaattataggctggttacagtggcttatgcttgtaatcccaacactttgggaggccgaggcaggakgattgcttgagcctaggagttcaaggccagcctaggcaacataacaataccccatctctacaaaaaaattttaaaaattagctgggcgt

SEQ ID NO: 1297 - DNA, 179 bp, Homo sapiens
ttggctattgtgattattattttccccattcacagtggtaacagtaacactactataaaatatttatctttactgaaaaatgtgagaaastgacataaagaaaattataggctggttacagtggcttatgcttgtaatcccaacactttgggaggccgaggcaggaggattgcttgagc

SEQ ID NO: 1298 - DNA, 179 bp, Homo sapiens
ctcttataaagtcattatgaatattaaattagttaacatagtaaagcatttagaagctaccctgcacatagtaaaccttcaatacatatwggctattgtgattattattttccccattcacagtggtaacagtaacactactataaaatatttatctttactgaaaaatgtgagaaact

SEQ ID NO: 1299 - DNA, 179 bp, Homo sapiens
ataagattggaaatagaaaaaaaggggttacaacttttaggaagggagaggtaaatttatcattatttgtagataatatgattgtacacrtagaaaatgcgtaagaatccattttaaaatgatgagaattaatactagaatgcagagaagtaacttgatgtaagataagtataaaataa

SEQ ID NO: 1300 - DNA, 179 bp, Homo sapiens
tacaaactagaatgagcctggttttactttgagacactattgtgaactagtatatgaagtaggcctgatagaaaattttagagctcaaaraaaagctaagaaatttggctcaaaaatgggacagattgaaaccatttttaaaggaatatgagactataaaggaaactgattcaggaggg

SEQ ID NO: 1301 - DNA, 179 bp, Homo sapiens
aaaaaaaaacaaaaaaaaaccccagcactttgggaggccgaagcaggcggatcacgaggtcaggtgatcaagaccatcttggctaacacrgtgaaaccccgtctctactaaaaaaaatacaaaaaaaattagccgggtgtggtggcaggcgcctgtagtcccagctactcaggaggctg

SEQ ID NO: 1302 - DNA, 179 bp, Homo sapiens
gtggaggctgcagtgagcctagatcatgccgttgtactccagcctgggcaacagcaagactccgtctcaaaaaaaaaaacaaaaaaaaamcccagcactttgggaggccgaagcaggcggatcacgaggtcaggtgatcaagaccatcttggctaacacagtgaaaccccgtctctact

SEQ ID NO: 1303 - DNA, 179 bp, Homo sapiens
gggaaaatagtggcagggggcagcatggtcgtgcagtaaagggctataactttatttgtatttcctcttacacaaaaccatcaaaacaasaacagaaaaaggctgaaaatccgttcaaaccccatgttctcagggatattccagggagttcttgaggctgagtgcgtagcttcaaatcc

SEQ ID NO: 1304 - DNA, 179 bp, Homo sapiens
tcagctcactgcaaccttctcctcccaggttcaagtgattctcgcgcctcagcctcccgagtagctgggattacaggcgtgcaccgccaygcctggctaatttttgtatttttagtagtgatggggtttcgccatgttgcccaggctggtctcaaactcctgacctcccgccttggcct

SEQ ID NO: 1305 - DNA, 179 bp, Homo sapiens
caagaaacccattcttaggtattcctcactgtaaggtaggagagggcagagagaactgagattggttagactcttttcatggaactttamcataagggctctgaatgaccccagaccaactctgggggcatgggaacttctacatcacaaaactaaataacgccttagcttacctgttt

SEQ ID NO: 1306 - DNA, 179 bp, Homo sapiens
aaagataaagaggcacgactaaaaatcagaagcaagtcaaagcaacaccaaaatgcagatttgccctaacgtcttcctctccgcataccytgaacaccaataattagggccttatccctgagcattttctaaccaataccaactacagtttaggtaactcagaaatatgatgattaaga

SEQ ID NO: 1307 - DNA, 179 bp, Homo sapiens
gctgggattacaggagcctgccaccgcgcccagctaatttttgtatttttagtagagacggggtttcaccatgttggtcaatctggtctygaactcctgacctcaggtgatccacccacctcggcctcccaaagtgctgggattacaggtgtgagccaccacgcccagcccctcttggt

SEQ ID NO: 1308 - DNA, 179 bp, Homo sapiens
ccgggtgtggtggcaagcacctgtaatcccagctactcaggaggctgaagcactagaattgcttgaacccagagggcagaggttgcagtragccaagatcacgccattgcactccagcctggatgacacagcgagactgtctcaaaaatacaaaaacaaacaaatctttgggagtgatg

SEQ ID NO: 1309 - DNA, 179 bp, Homo sapiens
aaaaaaaaaatttgctgggcatggtggctcacacctgtaatcccagcactttggaaggccgaggcagtttgatcataaggtcaagagatygagaccatcctggccaacatggtgaaaccccatctctactaaaaacacaaaaattagctgggcatggtggcgcacgcctgttgtcccag

SEQ ID NO: 1310 - DNA, 179 bp, Homo sapiens
aggcgccgtgcagcaacgtcacgcattggtgacgtctggtggggaccgggttttggggtttctcaccagttccgggtccccgcagggggrtcccggttctctccgttcctttgagtatgttgtggggagtggagctcggatagttcctagagtctaggcaagaaaagcagcactgcagg

SEQ ID NO: 1311 - DNA, 179 bp, Homo sapiens
gggcggatcacgaggtcaggagatcgagaccatcctggctaacacagtgaaaccctgtctctactaaaaatacaaaatattagccgggcrtggtggcgggtgcttgtagtcccagctactcgggaggctgaggcaggagaatggcatgaagctgggaggcagagcttgcagtgagccga

SEQ ID NO: 1312 - DNA, 179 bp, Homo sapiens
tgcttgagcccaggagttggaggctgcagtaagctgtgattgcaccactgcattccagcctgggaaaaacaaaaacaagaaacaaaaaawaaaaaacaaaaaccaaaaaaagggtagggtcccccctaagaatgggacccctagatgttttgttttttttttttttttttgagacagtc

SEQ ID NO: 1313 - DNA, 179 bp, Homo sapiens
atattctgttgacaatttttaactcagctccctgtgtgggcactagagaccctttaacacatccatcaccctttactcttaggggaatcmcatctgttatattttatttttatttttatatttttatttttattttattttattttattttattttattattttattttattttatttt

SEQ ID NO: 1314 - DNA, 179 bp, Homo sapiens
ttttttttattttttgagatggagtcttgctctgttgcccaggctggagtgcagtggcacgatcttggctcactgcaagctccgcctccygggttcatgccattctccagcctctgcctcccgagtagctgggaccacaggcactcaccaccacgcccggctaatttttttgtattttt

SEQ ID NO: 1315 - DNA, 179 bp, Homo sapiens
tgtattagacttcatctgtgagattcccttcaagtcaaagagcctagagcttttgtgcatgacaccaagatgggcttatgtctggggccrctaacctttagtccctgatagatctgagagagtctcacatgccctgggctctcatacttctgtttcctcaagggaatctaaacaaagag

SEQ ID NO: 1316 - DNA, 179 bp, Homo sapiens
aaataccagcttaagcttggcacctaactcagaggcaaaagcttctgggagaaatgagttgggtcaaataagcccaagaagctgacgtgkgtagaatttcttctgcttgacccactaacaactgcaaaggggacattttagaaatgttttttattgaaatgcttcagtgggggcagagc

SEQ ID NO: 1317 - DNA, 179 bp, Homo sapiens
attgcctacattcccgcaccccatctggcgatgctggtgtgttacagccatggatgacttactcttcacaatagccttcacttggatctmttccctactttaaaataaaaagacaaaaagaaggtgccaaagggcttgcctaaagtgctcccacccaacaagagtacaattcaaccaca

SEQ ID NO: 1318 - DNA, 179 bp, Homo sapiens
acccgaggaactgctggcagacggggagggcgggggcactgatgaggggatctacgatgtgcctctgctggggccagaggctcccccttytccagagccccctggagccttggcctcccatgaccaggacaccctggcccagcttctggccagaagccccccacccccacacaggcccc

SEQ ID NO: 1319 - DNA, 179 bp, Homo sapiens
agtcagctaaaggctcaactggaataagatacacttcgagttcactcatgtggatgttgacaggctgatatggtttgggtgtgtgttccmtccagatctcatgtttaaatgtaattcccagtgttggaggtgggacctagttgaaggcactggttcatgggagaagatcccttatgaat

SEQ ID NO: 1320 - DNA, 179 bp, Homo sapiens
ccaataggtaatttttcaaccctcactcccctcccacctcccgacctattggagttttcagtgtctattattctactctgcatgtccatrtgtacacatcgtttagcccccacttataagtgagaacacacagtatttaactttctatttctaggaaattttacttaggataatgacct

SEQ ID NO: 1321 - DNA, 179 bp, Homo sapiens
tccccaggtaaattatatgcatattaatgtttgagaagcactggtctaggcattcgtcattattgaaaacgttcatggaggtaaaaaaawaaataaatcactctttcccaaatgtcacccaagaatccatacttgtaaaaaatctcctgaagggatactgatgtgccgccagggctcac

SEQ ID NO: 1322 - DNA, 179 bp, Homo sapiens
tgctcactgaggtacaaacttttctttcccagaaaatatgacctaggcccatcacctcaaaatggttctctgaaaaggaccttttccaayggactcaatggcagtcacttttcaatctttcagctccattaagaatctaacaatgcaaaattttattattgtaggaaacctagcctgac

SEQ ID NO: 1323 - DNA, 179 bp, Homo sapiens
tccccctggggttgaaagcaactggcttaagaccttgctattccaagtgtagtctagacaaacacaatcagcatcacctggaaggttttsagaatgcagaatctcgtgcaccatcccagatccactgaatcagaatctgcattttaaacaagactccccaggtaaattatatgcatatt

SEQ ID NO: 1324 - DNA, 179 bp, Homo sapiens
catgtgatttcacttcttccttctagttctgtcttagcattggctttgggggtagatggagaagttcagtggtggggagggggtcagatytaactgagattggatctagtgtggacactacaggtcatgactctttggagtggtctcagaagctggctgggtcctgggccaaatcagat

SEQ ID NO: 1325 - DNA, 179 bp, Homo sapiens
ttcacacgattgacctgtcctctttgtgataattctcagtagttgtccgtgataatcgtgtcctgaaaatcctcgcacacactggctggkggagaactcaaggctaattttttatccttttttttttttaattttgagatatacgccctctttcatctgtaagggactaggaaattcca

SEQ ID NO: 1326 - DNA, 179 bp, Homo sapiens
cagcagcagacttgaaaatactttctagagaaagcaggctaggcccagaaatcgtctctgggacttcagtttcccatcagtcaaacgagmtgttcagttatagaatgatttctctccactgcagacttccaaggatggagaaaaggatctggcttggcagagggctccgtgcagagggg

SEQ ID NO: 1327 - DNA, 179 bp, Homo sapiens
cagtgagccaagatcgagccactgtactccagcctgggtgacagagggagactctatctcaaacaacaaacaaacaaaaaataaggcaargcggagtctggcaaaaatgggagtccctgcttcctttgctggtcctgtgagacatttggtttcagccattttaatgcaaattgataaac

SEQ ID NO: 1328 - DNA, 179 bp, Homo sapiens
tgtgaccaggattactgtcccattctgagaccgtcagagacatctctgccgggacacatgccagtgattgaaaacacagcaagggccccrctagctgaaaccaagttgcagagttttgagggtcccaccgccgaccgccggcccgccgcgagccctgccccctgcgcggccacgccccc

SEQ ID NO: 1329 - DNA, 179 bp, Homo sapiens
ctttgccaagtgctttttttcgtcctgacgactctttctgagtctgacgaatttagccagttcctttattccattggccagatcagactsctcctctcgtttatcctgttgggggcggaagtgagaaagcccttattcgtattggcttagatttgcaagcggcagttgtctatcaaatc

SEQ ID NO: 1330 - DNA, 179 bp, Homo sapiens
cgctgtccctggagcatcctccgctggagctggagcttgacaggtagggtggagagggcggtggggggcggggggccgaaactgcatcarttaacggggccgtgggggagggaagtcctccattgctaaggcttcagtaggcgttctatgatcacagtgtaaacaaagctgcagggaag

SEQ ID NO: 1331 - DNA, 179 bp, Homo sapiens
aaatagtgcaagatttaacaagactgttaaaaataaaatggaagttacacacagcctatcggccacaaagttcaggaaaagtggaaccaygaaccggacactcaagcagctactgaagaaatattgccaggaaattcatctgagataggatcaggttttgcctatggtcctcctctgag

SEQ ID NO: 1332 - DNA, 179 bp, Homo sapiens
aggagctcagcccacagctgtagccttgctgggcccttctcccgcagcccccctcctccagcccgcaggccctgtcctcaggggtggggkgggggagcgggaggcgagggggcccggctctgcccctgggggcacccctgctctcaccggacagtggtggggatgacctcagcagcaag

SEQ ID NO: 1333 - DNA, 179 bp, Homo sapiens
ggcgagcggatcactaggtcaggagatcgaaaccatcctggctaaaacagtgaaaccccatctctactaaaaaatacaaaaaattagccrggcatagtggcaggtgcctgtagtcccagctacttgggaggctgaggcaggagaatggcatgaacctgggaggcagagcttgcagtgac

SEQ ID NO: 1334 - DNA, 179 bp, Homo sapiens
cgagaccatcctggttaacacggtgaaaccccgtctctactaaaaatacaaaaaaaattagcagggcgtggtggtgggcgcctgtagtcscagctactcgggaggctgaggcaggagaatggcgtgaacccgggaggcggagcttgcagtgagccgagatcgcgccactgcactccagc

SEQ ID NO: 1335 - DNA, 179 bp, Homo sapiens
cccccggccacccaccagttgtaataatcacaaacgtctccagatgtttccaaatgtctcctgagggtaaaatcaccccaggttgagaastactgccctagaacttctctaggtttggtcagctgccaggatggggactcccagctcagcaggatgttctttgggctcccagccacgcc

SEQ ID NO: 1336 - DNA, 179 bp, Homo sapiens
ggagggagcaggagcaagggcagaggacaagggggaagaaaaggagactggggggaagggaacaagggacccagcaaaggtgggcctccrggggggcagcagggttaggagtttgtgagaaaggtaaatgcaaggagaaggcaggagatgaaagagaagcagatctcagattcagaagt

SEQ ID NO: 1337 - DNA, 179 bp, Homo sapiens
ggtaagttactaaatttccttgggcctcagtttcctcatctgtaacatggggataatagtttccatgtcatggtttcattgtcgggataraatgagatgatgcatgcccagggcttagcaccatgcctggcacatgtaagtgcacaggagctgaggccagcaggatatggaagggagag

SEQ ID NO: 1338 - DNA, 179 bp, Homo sapiens
atctttggggttcttaagcatcatttccaccaacagagatgtacctacccacagttgtctcagagcatggaggctgaaagtctgtgaggrcaagagtgaaatggagcagaggataggctgtggtttggaagcggctctggaatacgctgggggtggcggtggggctgaaggttggttat

SEQ ID NO: 1339 - DNA, 179 bp, Homo sapiens
caatgtcaagaaaatctgagatccagatgtctaaattcaagtggtagaatattgggttttatgtgaaagtgtataattacattatattcrtaatatatttcacacacaccctttaattacaaagctttaattaaaatatttgtctttgtttattaaggttaatattcccacatgattgg

SEQ ID NO: 1340 - DNA, 179 bp, Homo sapiens
gtggaggttgcagtgagccaggatcacgccattgccctccagtccaggtgacagtgtgagactctgtctcaaaaaaaaaaaaaaaaaaaraaatgtaggatgataacattagggaaaactgaaactgggtgaaggatatccaggaactctctgtactacctttgcaaactttcctgtaa

SEQ ID NO: 1341 - DNA, 179 bp, Homo sapiens
tctgaacttgcattaaaccaacataaatggttcagattaaatggttctcaaggtcccatcctggcctgggtctgctgagagcagttatgmgctcacctctcctgttagccctgaaactgggaactttgcacaatggttcaggagcctgtatccaatgtagaaacacagccaccaactcc

SEQ ID NO: 1342 - DNA, 179 bp, Homo sapiens
tgtctagaatatggaaagaactcttacgaccaataataaaaagacaactcaatttaaaaatgatctgaacagacagttctttttttttcyttttgagacggagtcttgctctgtcacccaggctggcgtgcattggcgcaatctcggctcactgccatctctgcctcctgggttgggtt

SEQ ID NO: 1343 - DNA, 179 bp, Homo sapiens
tgatatgaggccacttcgatttacttgaaaaacaagtttaatttgccctgactctaacctgttcttgaggaaagaatgccttgaagggakagaccacctggaattgactggaaaagggtgcagctggctttctttctttgcttatggctctttgaggagaagatgggtttgggggtccc

SEQ ID NO: 1344 - DNA, 179 bp, Homo sapiens
cagaaggatcacttgagcccaggagtttaagaccagcctgggcaacatagtgagacccctgtctctacaaaaaatttaaaaattagccaracttcgtggcctgcacctgtagtcccagctcagcgagaggaggatcacttgaaccagggaggtcaaggctgcagtgagctgcaatcatg

SEQ ID NO: 1345 - DNA, 179 bp, Homo sapiens
taaaatgtataaagcaagctgtacttcgaccactttgggcacgtgtcctcaggacctcctgaggctgtatcatgggtgcatccttaaccytggcaaaataagctttctgaattgattgagacttgtctcagataatttttggtttacaaattggtgcccatgaagggactctgagtgga

SEQ ID NO: 1346 - DNA, 179 bp, Homo sapiens
ggggaatcacatctgttatattttatttttatttttatatttttatttttattttattttattttattttattttattattttattttawtttattttattttattttattttattttattttatttggagacggagtcttgctctgtcgccaggctggagtgcagtggcacgatcttg

SEQ ID NO: 1347 - DNA, 179 bp, Homo sapiens
tcaacatcagaatagcaaaggacatccacactaaaaccccatccataggtcaccaacatcaaagaccaaaggtagataaaaccacaaagrtggagagaaaccagagcagaaatgctgaaacttccagaaaccagaacgtctcttctcttccaaaggaatacaagtcctcaccagcaagg

SEQ ID NO: 1348 - DNA, 179 bp, Homo sapiens
tgaagtgggagaatgagccactaatcccctgccttccaatgttcttgggttccaggagcctctactcattttgagaattcctttgagggytcatcatttgcagtgggtgacattgccctggcactgtactcagctctgttctcctactcaggctgggacaccctcaactatgtcactga

SEQ ID NO: 1349 - DNA, 179 bp, Homo sapiens
gactagagcactgaaaaggagggaaacagaatcatgtcgtagctgattgtagtctgattgatgtttagcaaattgcatctgagcaaaaamtactgtgtttcattttcccctaaaatcatttccacttgaaatttggaattatctgcagtgttagaatcaaatctttgaggctgtgcctt

SEQ ID NO: 1350 - DNA, 179 bp, Homo sapiens
agagtgttcagcattgaaggaaaacaccaaatctcaagcaatgtaattaaagacaaatccatatttctactggagacatcatagtgcaaytatagaacatcaaagagaaagaatgacttgaaagaacttcaaaagtattactttagcaagaaagaatatgagccataaaggggaatgag

SEQ ID NO: 1351 - DNA, 179 bp, Homo sapiens
gcagagctttgggttgcagatgccagatgcatatcacgagtgatagcaagatggtgtctgttaaggtggacttttcaagctgctgaggtyctgctcttttaatggccaccccagagtcctctggtgagaactgatagtggaaaagtgtgcttggttatgtccttatctggttggatgta

SEQ ID NO: 1352 - DNA, 179 bp, Homo sapiens
aaactggatacttaacatcttaactgaggcagttaatttatgacttaaaatgagtcagaactgtgcccaaagaaaaaccataagaatttyattcaggagtggaggaattttatccctgctgaaaaaagctgaaagacaggacagaaaacaagaggagaattatgtattctcataatttc

SEQ ID NO: 1353 - DNA, 179 bp, Homo sapiens
caagaggagaattatgtattctcataatttcaaaaacaagaaaagtttatgtcttgtaaggtgacaggcactgctggaaagatgctgtamtaagtttattcacgtcttcgaaacccagatgtttaaaaactgcatgggaaccttatacattgctaatgtgcatgcaaattggtgcaaat

SEQ ID NO: 1354 - DNA, 179 bp, Homo sapiens
atatatacatatatataatgaaatataatataaagatgaaagttctaatattttctttttgattaccaggagactattttgctaaccatytggggtgcatacaccctattttaataccatttgtttagagatgttattttactatgagaaaaaacacaaaaagtatattaagaaattta

SEQ ID NO: 1355 - DNA, 179 bp, Homo sapiens
ttctgtcaggactcttgttgatacagtacgttaacatttgtgtttttttaaaaaaaaaaactggtaagtatgcttgcaggttgaggtacwtgcacttatttatgcttagaatatctctggaaaactgcagaagaaactggtaacagtggttgcctcgagggaaggaaaatgggtggctg

SEQ ID NO: 1356 - DNA, 179 bp, Homo sapiens
aactatcctaaatgtgtaagtgtctaacaacagagcttcaaaatagataatgtaaaaactgacaagactagaaggaaaaatagaaaaatmtgtatattcacagttgaaaacttcaacacactcttctatcagtagttgatagaacaagtaaacagaaaaatcattaagtgtatggaaga

SEQ ID NO: 1357 - DNA, 179 bp, Homo sapiens
gtggaaacccaggcacgggagtgtctgctgtcactcatgagctcttttccacgggctttcaccacgtgcgaatgagaaagacaggagacwgagggaacctcaaattaaaaaccagagcttgtcagcttagaaccaaaacatgacccaatggatctgttgtctcctagaaactcacttta

SEQ ID NO: 1358 - DNA, 179 bp, Homo sapiens
actttgaaaatgtaccagacattctatttgggcaccggaaagtcccccggaacccctcccccttacctagatgggacaccagagccataygtcgagatttttgtttaggtcggtacatctgggccgaccttgcccagcctgtttctcacccaccattcttgtctatcctggtcctcatt

SEQ ID NO: 1359 - DNA, 179 bp, Homo sapiens
attaatttttgttggtgaacattccttgtattcttgggataaacccttcatggccatgatttatttatataaaatatatataatatatayactactgtatacatactattacaacttcatgatttttgcatccatgttcaccaatgagattaatctataattgtccttatcctggttta

SEQ ID NO: 1360 - DNA, 179 bp, Homo sapiens
ttggcctcccaaagtgctgagattacaggtgtgagccactgtgcccaggcccaaaagttttttatatgtaagtccatgttaaaggatgaytcaccaaaatgcattgcacactactcaaatgaaaggaagacaaagtctctacctataaggcacttaaagtgtatttcagatgggaatgt

SEQ ID NO: 1361 - DNA, 179 bp, Homo sapiens
ttatcagacatcaagtaggcagctgaacagtatatgagtctggagttcaggaaagagggtggagcttgagatagcaatttgagagtggtyggtctaataaatggtatctaaaaccatagggctggaagacatcacctagtgggttagtatttacagaggaagggtctgaggactgggcc

SEQ ID NO: 1362 - DNA, 179 bp, Homo sapiens
tattggccaggctgctcttgaactcctgaccttgtgatccgccctcctcagcctcccaaagtgctgagattacaggcgtgagccatcgtkcccggccaaaatatatatatatatatttgatacagagtctcactctgtcgcccaggctggagtgcagtggcacgatttcggctcactgc

SEQ ID NO: 1363 - DNA, 179 bp, Homo sapiens
agtgaacttgatttttaaatttctgttcaataatcaaaatgaattgataaaattagtctcctgaaatcaaaattaaatgtccaaaaattwaaaaaaaattaacagaatctgagcttgtaactttattgagcaataaaatggcttagattcttacacaaaaaagaagaccatttttagat

SEQ ID NO: 1364 - DNA, 179 bp, Homo sapiens
gctcctttctcccctattccctcctctttcttcttcctccctttctctccctcccagtgcctttctctctctctctctctctctctctcwcacacacacacacacacacacacacacacacacacacctgtcctgtcctttacaggattcactcatcttgcaaggctggctaatggcac

SEQ ID NO: 1365 - DNA, 179 bp, Homo sapiens
ccaatccaccatcagctcttgattggactgctattatatcttcttaacttatctcactgctagcattctctcaaccacttgaagcctatmgtttctgtagcaatcagaatggcacttttgaaatataccctgtagtgtgttcccataacttcatctctgaactcacttcatataattct

SEQ ID NO: 1366 - DNA, 179 bp, Homo sapiens
atccatggaatgggggtgagcagctactgggcagaccccatctctgcaggcacttgctccccagggccccacaagcacattcccttctaytcctatgagaatcttcaatcaaagaccaagcacagcccaaaggcaagggaagcctgtttgggccacagggatccttctctctctctccc

SEQ ID NO: 1367 - DNA, 179 bp, Homo sapiens
gcccacaatatcctgacctcaaagactaggaaggtaggtggtgctaaggtcagggattgggagtcttagagagccagcaacacagtgtcrtctctctgaaaagtaaatttccagtagctagcaagagatttacaaatgctgaaatctcttagtctactaattcctttcatacaatcaaa

SEQ ID NO: 1368 - DNA, 179 bp, Homo sapiens
cccctatttgatgtttttattattctcattttatagatgttgaaactcaaactcaaagatcttcagtaacttgcccagtcacaaagtcakgggaagaaatgtgatcttaattcgggaagcctgacctgtctgtgctcatactcactacgctatactgccctcttgtggccagaatgagt

SEQ ID NO: 1369 - DNA, 179 bp, Homo sapiens
tcatccgtgtccctacaaaggacatgaactcatcattttttatggctgcatagtattccatggtgtatatgtgccacatcttcttaatcsagtctatcattgttggacatttaggttggttccaagtctttgctattgtgaatagtgccactataaacatacgtgtgcatgtgtcttta

SEQ ID NO: 1370 - DNA, 179 bp, Homo sapiens
gtaaaatatggcagctgataacagcagctgctggaacacaagtgacgactgcagggaagaaggctatgggagagctacagactcaaagcrcagcttttctggaccacttagtaacctggccagcagccctgcatgttcctgaggcctcacagggttccctgccttcccacgttgggcag

SEQ ID NO: 1371 - DNA, 179 bp, Homo sapiens
tgtgtgtgtatatacatatatacatatgtgtgtgtatatatacatatatacatatgtgtgtgtatatacatatatacatatgtgtgtgtrtatacatatatacatgtgtgtgtgtgtatatacatatatacatgtgtgtgtatatacatatatacatatgtgtgtgtatatatacatat

SEQ ID NO: 1372 - DNA, 179 bp, Homo sapiens
gcacaatgctccagcctgaaaaaccgagtgagaaccagtatgaatttaaaaaaacaaacaacaacaaaaaaccaatagcaaccaatcagytatgtttcacatttttcttattttttgtaataaaaaattaaaaattgaattaaaaaaagactggtaaagcagattctttgtaacaagaa

SEQ ID NO: 1373 - DNA, 179 bp, Homo sapiens
ggtgaaagagctcagattctaaagggtctaactccaaaatctaaagggtctaattctaaatctaagacctttcctctatattgtctctgyggatgtaccacctctaggtcatggcaggaggaggtatgcagagtctccctggaaatctggataatttatatctgctgtttctttctatt

SEQ ID NO: 1374 - DNA, 179 bp, Homo sapiens
taaacttttattttgggttcaggggtacattgcaggtttgttatataggtaaactgtatgtcatgggggtttggtatacagataattttrtcactcaggtaataagcatagcacccgataggtattttttctgatcatctccctcctcccaccctccaccctcaagaaggtcccaatgt

SEQ ID NO: 1375 - DNA, 179 bp, Homo sapiens
cctttgccagataagtagacaatctcctaaaaaaagaaaatagcttacatcttttttatattcccacactgtcaaaaatactgggtctgygcacgcacacacacacacacacacacacacacacacacacacatgtttgggactgaaacaagtaattcagtcaaacaacctgtcagttc

SEQ ID NO: 1376 - DNA, 179 bp, Homo sapiens
gacgctttgacacgagttagagacattgcttctgctgctcacatgggaattcatcatgacacagtggatgaacaatgcagtgagcagcayttaccctcaaggacggaggttatgatactgacaacactcattgccctttgggcccggaaaggttcatctaagtattctgctgacaagaa

SEQ ID NO: 1377 - DNA, 179 bp, Homo sapiens
ttctctattttcaagttaatgtattctcagagcatgcaaaataatttgaatgactgcctaaggaagcactaatacatgctaaaacattaygttttctatagctaaagagccctttgcagccacagttttttcaaatattcctagaaaacaagatctggctgaactgaaaatactgatag

SEQ ID NO: 1378 - DNA, 179 bp, Homo sapiens
gttgacaaaatacatgtacacacacacacacacacacacacacaagtctggtacagtgtaagccaatttgccatgccaaagggcagttcmgaagcaacagccctaccatggcccaagcaaagtggctgtggcctgctaccttctgcatactgggtcgaattccaggcataagcagacgc

SEQ ID NO: 1379 - DNA, 179 bp, Homo sapiens
tttttaaccactaaagtaaataaagatgtgattaatgcttaagtatcatcagagatacacagtgagataaatagagtgtgtctaaaaaaytcagcaggattagataggtcatttaaatgaattctcatctgtgaaaggaaaatataatttattaagcaagttatttacattagttacaa

SEQ ID NO: 1380 - DNA, 179 bp, Homo sapiens
atatatacatatatacatatgtgtgtgtatatatacatatatacatatgtgtgtatatatatacatatatacatatgtgtgtgtatatayatatatacatatgtgtgtgtgtatatacatatatacatatgtgtgtgtatatatacatatatacatatgtgtgtgtatatacatatata

SEQ ID NO: 1381 - DNA, 179 bp, Homo sapiens
aggcagagttcgcagtgagccgagatcatgccattgcactctagcctgggcaacaagagcgaaactccatctcaaaaaaaaaaaaaaaaraaaaagaaaaagaaaaaagaaatgagcaaaagatctgactagacatttctcaaaacaagacgtacaaatggcaaacaggcatgtgaaaa

SEQ ID NO: 1382 - DNA, 179 bp, Homo sapiens
cagctgggcttctggattgggtggggacttggagaacttttctgtctagctaaaggattgtaaatgcaccactcagtcctctgtgtctarctaaaggtttgtaaacacaccaatcagcactcagtaaaaacagaccaatcagcactctgtaaaatgggccaatcagcactctatcaaac

SEQ ID NO: 1383 - DNA, 179 bp, Homo sapiens
ttctaggaggccacggtgggcgagtcacttgaggtcaggagtttgagaccagcctggccaacatggtgaaaccccatctctcctataaayacaaaaattatccaggtgtggtgccacgtgcctgtaatcccagctactcaggaggctgaggcaggagaatcacttaaaccagggaggtg

SEQ ID NO: 1384 - DNA, 179 bp, Homo sapiens
gccaggcgcagtggctcatgccttgggaggctaacgggggaggattgcttgaggccaggagtttgagacgagcctgggcaacatagtaasacctcgtcttcataaaaatttaaaaataaaaattagccaggcgtggtggtgcgtgcctgtagtcctagccattcaggaggcttgaacgg

SEQ ID NO: 1385 - DNA, 179 bp, Homo sapiens
caaaagggagaactgaacctctttttcttctcttttctttctttttttagagacaaggtttcgttttgtcaccccggctggagtgcagtrgtgtgatcatggctcactacgtccttgaacttctgggctcaagcgatcctccccgttcaagcctcctgaatggctaggactacaggcac

SEQ ID NO: 1386 - DNA, 179 bp, Homo sapiens
atggtagccagctacaatagtgatctactgtgtacacatagtttgttttttgtttttttgccttatcatataacaaggagtatattgatyagtgtattagtttcttattgttgatgccacaaagtgccacaaatttaatggcttaaaacagcacaacctaaaacagctatattatctta

SEQ ID NO: 1387 - DNA, 179 bp, Homo sapiens
tgcccatttctggccctttatgcagcactctcaactcatctgtcatttatccttgcagcctaagtaacattcgtttttatcttgggaagsagtctactgttttatcattaagtaagaggtttacactcattttcttgaagcttcctttaatcaagttaagacagtctctcatttattac

SEQ ID NO: 1388 - DNA, 179 bp, Homo sapiens
ttgggaggccaaggcgggtggaccacaaagtcaggagatcgagaccatcctggctaacgtggtgtaaccctgtctctactaaaaaatacmaaaaaaaaaaaaaatgagctgggtgtggtggcgggcgcctgtagtcccagctactcgggaggctgagacaggagaatggcgtgaaccca

SEQ ID NO: 1389 - DNA, 179 bp, Homo sapiens
ccgagactgtgccactgcattccagccttggtgacaggttgctctgcaacctcacctgcatttggtattgtcagaaattttcaaaaaccyatttaatgggttaataatgcaacatcattgtagacataattatatgcccctaattattaatgatgttgagcatcttttttgtatttgcc

SEQ ID NO: 1390 - DNA, 179 bp, Homo sapiens
ggtgggcggatcactttgggccaggcattcgagaccagtttggccaacgtggtgaaacctcctctctactaaaaacacaaaaattagccrggtgtggtggtgcacacctgtagtcccagctactcaggaggctgaggcaggagaatcacttgaacctgggaggcagaggttgcagtgag

SEQ ID NO: 1391 - DNA, 179 bp, Homo sapiens
ccttttccagaatgtcatataaatggaatgatgcacaatgcagacttttgtgtctggcttctttcagttaacataatgcatttgaaattmattcctgttgttgaaagttccaatagtttcttcctccttactgttgagtagtattccattgaatgaacgtaccagagtttgtttattct

SEQ ID NO: 1392 - DNA, 179 bp, Homo sapiens
acctgtaatcccagcactttgggaggccgaggtgggcagatgacgaggtcaggagtttgagaccagcctggccaacatagtgaaacctcrtctctagtaaaaatacaaaaaatttgccaggcatggtggtgggcgcctgtaatcccagctactcagaaggctgaggcaggagaattgct

SEQ ID NO: 1393 - DNA, 179 bp, Homo sapiens
tggcttactgcagcttcaacctccctggctcaagtgaccctcccacttcagccttccaagtagctgggactacaggtgtgcaccatcacrcccagctaatttttgtatttttttgtagagacaaggtttcaccatgttgcccaggctcaagtgatcctcctgccttggcctccccaaat

SEQ ID NO: 1394 - DNA, 179 bp, Homo sapiens
tgcagatttacattatgtagaaaaatgataaagccagtgcagcaaaagcagagtactccgtgttcttgatgggaggatttctcagcttcyttcttacctgtaatttcccacctaccccagcaactgacagtccagctttttgcatttcacatgctgcagttaattgtcactgtgtatct

SEQ ID NO: 1395 - DNA, 179 bp, Homo sapiens
aaatttctgtatttttagtagagatggggttttactatgttggccaggctggtctcgaactcctgacctcaggtgatccacccccttggsctcccaaagtgctgggattacaggtgtgagccaccgcgcctggcctaatttttgtattttttgtagagatgaggttttactatgttgcc

SEQ ID NO: 1396 - DNA, 179 bp, Homo sapiens
aagaaaagaagtttatttggctcatggttctgcaggcttgaagcatggtgccagcatctgctgctggtgagggcctcagactgcttccaytcatggcggaaaaagaaggggagccctcatgggcggagatcacatggcaatagagaagcagcaaaagagtgggagggcaaggtggcagg

SEQ ID NO: 1397 - DNA, 179 bp, Homo sapiens
gcttgaagcatggtgccagcatctgctgctggtgagggcctcagactgcttccactcatggcggaaaaagaaggggagccctcatgggcrgagatcacatggcaatagagaagcagcaaaagagtgggagggcaaggtggcaggctctttttaacaggcagatctcaaggaaactcata

SEQ ID NO: 1398 - DNA, 179 bp, Homo sapiens
catgcatttatctcatctgttcccccacgacacccctatttgatgtttttattattctcattttatagatgttgaaactcaaactcaaaratcttcagtaacttgcccagtcacaaagtcaggggaagaaatgtgatcttaattcgggaagcctgacctgtctgtgctcatactcacta

SEQ ID NO: 1399 - DNA, 179 bp, Homo sapiens
agggtcttaccacatctttagactttgaattgatgtcttccaatattttgagatacaatttttatccagcattttttcaagcgttgattktctcctctattctttctcctatccctctgggattccggttaactacatgctggacttccttactattttctttagtttttcttttgtgt

SEQ ID NO: 1400 - DNA, 179 bp, Homo sapiens
atcacagatcccaagaagcttcaaaaatgaatctttcatctaacataaattaaacttagcgcaattcctggcgaaagccactctttcccygaccctataaaatatctaatttccaacttttccactttgatatctaagggctagcagcaacagaataggagcttatttttaattgcttc

SEQ ID NO: 1401 - DNA, 179 bp, Homo sapiens
ggtgctattggtgcatacttcaggtggctgtggccattgcttccgttgtctaataggactggaagttgttaatctatcaattgagattaytgaccatggtaacagattgaataaatgagttcctcaatgcctatgcctcagggagataacgaatggtgactctaatcaatatccgtata

SEQ ID NO: 1402 - DNA, 179 bp, Homo sapiens
tatatacatatgtgtgtgtatatatacatatatacatgtgtgtgtatatatacatatatacatgtgtgtgtatatatacatatgtgtgtrtatacatattacatatgtgtgtatatatacatatatacatgagtgtgtatatatacatatatacatatgtgtgtgtatatatacatata

SEQ ID NO: 1403 - DNA, 179 bp, Homo sapiens
ttggttgatgtccagggcaataagaaaggggcttctggaagactgcatcctcccacacaaccagtcagtcccaggagggcaaggaccccmccatgaccagagtgggtggagacaagctgagggcagggggccaggctggggcggagaaggggtattggggcttattggcaagtgagtct

SEQ ID NO: 1404 - DNA, 179 bp, Homo sapiens
aatccaaattctttttttttttttttttttgagacagagtcttgctctgtcacccaggctggagtgcagtggtgcaatcttggctcactrcaacctttgcctctcaggttcaagcgattctcgattctcagcctcctgagtagctgggaattaaaatcctctgtaatgttaggcacatg

SEQ ID NO: 1405 - DNA, 179 bp, Homo sapiens
tcaatagaatattcgttcttctcagcaccacattgcacttatgctaaaattgaccacataattggaagtaaaatactcctcagcaaatgyaaaagaatggaaatgataacagtctctcagaccacagtgcaatcaaattagaactcaggattaagaaactcactcaaaactgctcaact

SEQ ID NO: 1406 - DNA, 179 bp, Homo sapiens
aatgtcgccctgcctgctctgcaggcaagtgatacaaggatttaagacaattcacattttggcctaaacattatagaatggttggaacaygcttgtcttgtgtagacatggccttgttcttgctttgagagtcttctagggttgttaggggtcatgggcagtatttgagtgcccatgac

SEQ ID NO: 1407 - DNA, 179 bp, Homo sapiens
aaaaaaaaaaagtgtgatgagagattataacacaagaacctgattttgattagtaaggcttctctggaaaagtggactgaagagtgaacrgaaattacttaggcaaggggttgaatgtgccatgggatatggagaagagcattctaggaagaaaggaacatttgcatcttcggaggccc

SEQ ID NO: 1408 - DNA, 179 bp, Homo sapiens
gttgaaattagaggggagctcggaaatctgtggtcaagtctgtccaaagtataagtagatggagagaaacttcgaaagagtcagaagagrccaggccaggaaagatgaagaaaataataaataaaggaatcttgaaggcagatggcaaaaagaagtttggaatggagcttggagtgaat

SEQ ID NO: 1409 - DNA, 179 bp, Homo sapiens
tgtgtgtatatatacatatatacatatgtgtgtgtatatatacatatatacatatgtgtgtgtatatatacatatatacatatgtgtgtrtatatatacatatatacatatgtgtgtgtatatacatatatacatatgtgtgtgtgtatatacatatatacatatgtgtgtgtatatat

SEQ ID NO: 1410 - DNA, 179 bp, Homo sapiens
tcatattatttttggccagagactaccagaattaagaaattaaagagaaggattttgcagaataacctcaaaggtagtctcaaaatccayaattatactaactgaacacagagaaagagagagagtatacatcacctacctatgtcatgtgtttttctttttctctttgtaaaccagat

SEQ ID NO: 1411 - DNA, 179 bp, Homo sapiens
tggggtgggaggcgcaggcgagagtgagctgggtggaagaagggatgatgacaagaagggataatgatagtgattggatgagctggtttrgggtagctcaagaaacggggatgctaatttggggctcagggtgcgcagaagccaccggagaagacgcccttgccagggggagtggggca

SEQ ID NO: 1412 - DNA, 179 bp, Homo sapiens
ctccaccacttctagctgggcaatcctgaacatgtttcttagcctctctatgacttactttctttctctgaatatacaaaaatagtagcmcctgccacagagtggctatgacaactaaaagagagaaggcatttggagcatatggaagagtacttgatacagagaaagcactcaataaa

SEQ ID NO: 1413 - DNA, 179 bp, Homo sapiens
ccaacctggccaatgtggtgaaaccctgtctatcctaaaaatacaaaaattagccggtcgtaatggctcatgcctgtaatcccaactacytgggagactgaggcaggagaattgcttgaatctgggaggtggaggttgcagtgatctgaggccatgccattacactccagcctgggtgg

SEQ ID NO: 1414 - DNA, 179 bp, Homo sapiens
tcatcattcatttgtcctttttccccctaagttcctccctctctccctccctccctccctccctccctgggcgacaagaatgaaactccsgaaagaaaagaaaagaaaagaaaagaaggaaggaagagaggaaggaaggaaggagggagggaaggaaggaaggaaggaaggaagggagg

SEQ ID NO: 1415 - DNA, 179 bp, Homo sapiens
catctatcaactacccctgctggcaaagatgtaataatagtgcaaatcagggccactatcttgttaataaacaggacatcaagagatcayctatacaggaaaagctttggacatcagaaggtaaaagaattttaagatttaatcttatccagttcaatatgtaatgagcttgtcacttc

SEQ ID NO: 1416 - DNA, 179 bp, Homo sapiens
tttagctcagagaggtttgttattaacgaccttccaaagcctacttctgtcaacttatcaaagtcgttctccgtccagctttgttttgtygctggcaaggagctgtgatcctttggaggagaagaggtgctctggtttttagaattttcagctttttctgttttctacccatctttgtg

SEQ ID NO: 1417 - DNA, 179 bp, Homo sapiens
gcaatggtcatttattttaaaaaattattgggtttttattatgatatgtaacatgcataataaaaatgtacataaaacataaattaattrttttaaaacaaatgtttgtgtattagtcagcctttgttgccttaacaaaataccatagactgggtggcttatgcaacagaaatttattt

SEQ ID NO: 1418 - DNA, 179 bp, Homo sapiens
ttgccagataagtagacaatctcctaaaaaaagaaaatagcttacatcttttttatattcccacactgtcaaaaatactgggtctgtgcrcgcacacacacacacacacacacacacacacacacacacatgtttgggactgaaacaagtaattcagtcaaacaacctgtcagttcaga

SEQ ID NO: 1419 - DNA, 179 bp, Homo sapiens
cttattcaacatagtattggaagttctggccagggcgatcaggcaagagaaagaaataaggggtattcaaataggaaaagaggaagtcarattgtctctgtttgcagatgacatgactgtatatttagaaaaccccatcatctcagcccaaaatctccttaagctgataagcaacttca

SEQ ID NO: 1420 - DNA, 179 bp, Homo sapiens
actttttttttttaagagacaaggtctctatgttgcccaggctggtcttaaactcctgagctcaagttatcctcccgccttggcctcccrgagtgctgggattataggcctgagccaccatgcccagctggtcttataattatttataaaacaaaacactgatttttcatatatatcag

SEQ ID NO: 1421 - DNA, 179 bp, Homo sapiens
aaactgttttttatctttccttccctcgaaattatataattttagtttatagtttgtcttttgtccaagaattctttaagagagattttwaaaaattatcaagtggaaagtcctctcatttcattaaatttggttattttttttaactctatttcattatgatcagagaatgttttcta

SEQ ID NO: 1422 - DNA, 179 bp, Homo sapiens
ttcttttctatttggaaaacagtttcataatgtacaaaacatgcttactgcagcaggatacataaaagattaatgttatctttgctatckgttgagtgagaatggagaatcatcattcatttgtcctttttccccctaagttcctccctctctccctccctccctccctccctccctgg

SEQ ID NO: 1423 - DNA, 179 bp, Homo sapiens
atttgggtgaataactagaaatatgccatagattcttgaggctttgcctggttcactaatgacaggctccagggcgtttctcagggagcrtgttagcatgtttctaggaccagccacatcagccagacctggctctgtacagacccaaacctgagaatgccatgtgagacctgtgtgac

SEQ ID NO: 1424 - DNA, 179 bp, Homo sapiens
aaaagtaaagaaacaagaaccaaaataattttcaagaagacaaataaggaggggcatgtgaatcgaccaggtcaaatcttactatagagmatttaaatccacgtggtgttgactcaggatgtgacaatgagattactgggagaaacagattcagtagacatgggaatctggtgcatggc

SEQ ID NO: 1425 - DNA, 179 bp, Homo sapiens
agagtatgaaaaacctgagtatcttcatggcagtgagggaaggggtggctggtctgggtggtgtcctctgctaggccttgccatggggtrcctcatctggtctcacccaccttttagcatgaatgacacacattgctactgaccacttgatccaaccaaagccactggtcatcaggctc

SEQ ID NO: 1426 - DNA, 179 bp, Homo sapiens
tgctaatgctgtactctgacctaccccagactagtctattaggtggcaccatcagcacttagacctttagaagcatctcaggcttaaccygtgtggaacatagtaggtgctcaattaatatttgttgaatacataaatgtttagaactgtactcttacctttttccccccagccttccc

SEQ ID NO: 1427 - DNA, 179 bp, Homo sapiens
tcaattctgggcagtcctctggaaaggaaagaaaatgcaagtggtaagttgacatgctgcagcccacttgccccttcatatctgcatggyatcacaggaagtcagacatgcaaacgggtatagagtttgcagaatgaagggtagatgcaggtcaatattttgaaagcagaataggtctt

SEQ ID NO: 1428 - DNA, 179 bp, Homo sapiens
tttctcagcaatgtttttaggatccattcagctagatatataggtatgtaaattcttttatttttgaatttgtttaacttgacagataaygttgtttgttgttattgtgtacaaatgatgttttgaagtatatatacattgaggagtggtttgaaaattccttttaactgctatatgca

SEQ ID NO: 1429 - DNA, 179 bp, Homo sapiens
gaaggggagggtgtggttggtggggtttggttgagcttaccgtgcccccaggggatgagagaggcactcttggggaacccccagtaggckgggtgctggtctctctctacctcctgcatctgcctggtggtgcctcctctggatccccagcatctcctcgtttcttcaggcctccccct

SEQ ID NO: 1430 - DNA, 179 bp, Homo sapiens
ctgggaccaccaacacacaccactatgctcagctaatttttatttattttttgtagacatgggggtctcactatgttgcccaggctggtmtcaaactcctgggctcaagtgactcctgggctcctaccttggcctcccaaagtgctgggatcacaagcataagccaccatgcccagcct

SEQ ID NO: 1431 - DNA, 179 bp, Homo sapiens
tttgctatctttaatcattacatacacatttcattacacgtcctaggggtggcattaagctctatgtaaccactagtgtcatagtatctrtaaacacagcttcgccattccctaaaaaggctacaggaagaaattaaaaccatgagtataaagtggattttttgcccttcttcccaccc

SEQ ID NO: 1432 - DNA, 179 bp, Homo sapiens
ctgcactctagctcctcaggtttttctcaagaatattaattatttcctctcttttttgatattatttctatttcttcctctctacttccyattagcacttatgcatagtccaatttatctcattactacaaacagctcaacaaaccagccaaacatctccctctgcccccacaaagaac

SEQ ID NO: 1433 - DNA, 179 bp, Homo sapiens
gttcaggagtttttgtagagcttaatctctagtccccttccccctcctggaggttgatgggtagagttgaaagttctagccttctaatcycttggtctttctggtgatcaacctcattctgaggctaagggccccacccttaatcactttattataatagcatagactcaggtgtgatt

SEQ ID NO: 1434 - DNA, 179 bp, Homo sapiens
gacatgaaaagtaagcaggtcaggatataaccaatcaagatacatttataatgccaggtgaagctggtgagcatgatttggcctttatarggtcaaacttcagctaacccataagcccagggacagtctcttggctgttggtgacaggcagcaagttcattagaagattggagcctgtt

SEQ ID NO: 1435 - DNA, 179 bp, Homo sapiens
gagccactgcgcctggctctttttctttcttattttcaatttgtactgcctttacagcagcagtgtaggtagcgcctcctgaagaaatgyaagttgaaaaggggaacatattatttcccagtctccagaagaaacgcagtcctgccggtatcctgattttagcccagtgaagccaattt

SEQ ID NO: 1436 - DNA, 179 bp, Homo sapiens
gtggccttttgctcacctgctgccccccactccctgtttgtctgcctggggaattctgactttttcttccaggccctgctcaaacgccamctcctctggaaagcttggcatggtttaaacttctttatgtcaaggtctcctctgcatttcccttttgccctttgtcactcaagccctga

SEQ ID NO: 1437 - DNA, 179 bp, Homo sapiens
aaggagccctcagaagaggaggggagtcagaggcaaggaaggggctgaggcagccagcccagctgagtggaccccaggagaggtatcaargggtggtgtggggtggggaggggccagtgtcagaaagtggatggggagcggcctgactctgcttttgtcctgtggccttctggccaaag

SEQ ID NO: 1438 - DNA, 179 bp, Homo sapiens
caacctccgcctcctgggtccaagcgattctcctccctcagcctcctgagtagctgggattacatgcatgcgccaccactcccagctaawtttgtatttttagtagggttggggtttctccatgttggtcagactggccttgaactcccaacctcaggtgatcctcctgcttcagcctc

SEQ ID NO: 1439 - DNA, 179 bp, Homo sapiens
aagtcatcaagatcagattcaccctcagcaatgggcacagagacccacacagtcggattagcgatgaagtcactgtgctcatccctgggrcctctgggagcttggagccctccagagctccccctggcagtgttggcagcaatgtggttctcagccttggagctggagagtgggagttt

SEQ ID NO: 1440 - DNA, 179 bp, Homo sapiens
agtcaagattgagaggacatacaaggatggagaaaacaagaacagaggacaccatgtttattctgatgtgggcagggggcctcctggaaygttcctgctaatgtttggaaatcgtctgagcccagagagaggctctgagcccttactcagatttcctcagattcaaagccccatgttcc

SEQ ID NO: 1441 - DNA, 179 bp, Homo sapiens
tgaatctgggaggcagaggttgcagtgagttgcaattgcaccactgcactccagcctgggagacagcaactctgtctcaaaaaaaaaaamaaaaaaaagaagaagaagaaaaaaaaatttaacaatccactgtgtcttaaatttcagcttttgtcaccactccctccaaaaaaaggtgc

SEQ ID NO: 1442 - DNA, 179 bp, Homo sapiens
cggattagcgatgaagtcactgtgctcatccctggggcctctgggagcttggagccctccagagctccccctggcagtgttggcagcaaygtggttctcagccttggagctggagagtgggagtttcaccaccagctcaggctctgccttgggctgggggaatgggcaggacctgctga

SEQ ID NO: 1443 - DNA, 179 bp, Homo sapiens
tggtgtgatcttggcttattgcaacttctgcctgttgggctcaggcaatctgacacctcagccttccgagtagctggaactacagatgcrcaccaccgtgcctggcaaatttttgtataggtagagttttaccatgttgcccaggctggtctcaaattcctgaggtcaggtgatccacc

SEQ ID NO: 1444 - DNA, 179 bp, Homo sapiens
catttttgcaacaaccactctggctgcttttgcatgtggggggtgtgtgccgtggtggcagcagggactactgatgctgaaaagagccasagcagagaaaccagatgggagggaggctgttgcaggctctcaggggggagagatggtgctggttctgggctagaagataaaaagataaa

SEQ ID NO: 1445 - DNA, 179 bp, Homo sapiens
aacacctaattttctattaaccttgattttcatttatttgagctcattgctaccaaaagctttattgcagaatgcaaaatcattgtcaartaattgaatcagtagttgcagatttacattatgtagaaaaatgataaagccagtgcagcaaaagcagagtactccgtgttcttgatggg

SEQ ID NO: 1446 - DNA, 179 bp, Homo sapiens
caatggccatttggactgttccagtttttggccattattaacttggtcactttgaacatttttgatagattagattagatagatttttaytccttaaaataaggaataaaataaatgggcctgctcttggtgtgggaatatttttttaaggatttggcttaaaaagtcctttattttaa

SEQ ID NO: 1447 - DNA, 179 bp, Homo sapiens
tttagggaccgtgctggaagcggggcggggagggcgctggcgggagagggctgggggcggagagcggcggaggcgcagtcgccgggtcasagtccgcagggaggcccccaggccgctgcgccaggctccaggcgggggaggaggcggcgcctccggggcggggctgccgggcggcctgg

SEQ ID NO: 1448 - DNA, 179 bp, Homo sapiens
gcctgagccacagcgcgcggctgggaagagggatttccaactccacctgtaagatgtacttagttcagggggcaagaagcagaggtaagrctcaggaagtgtcccaccctttgggaggtgctgccagcttctcctcctgtgtcctatgccctgtgagaatgcactggcccaccttgccc

SEQ ID NO: 1449 - DNA, 179 bp, Homo sapiens
ttctgagaaatgtgtggttgaggccatttcatcattgtgcaaacatcacagagtgtacttacacaaataaagatggcatagcttttacamacctaggctatatgacatagcctactgctcctaggttactgtcttagtctgattgtgttgtaataaaggaacacctaaggctcagtaat

SEQ ID NO: 1450 - DNA, 179 bp, Homo sapiens
ctgagaaatgtgtggttgaggccatttcatcattgtgcaaacatcacagagtgtacttacacaaataaagatggcatagcttttacacayctaggctatatgacatagcctactgctcctaggttactgtcttagtctgattgtgttgtaataaaggaacacctaaggctcagtaattt

SEQ ID NO: 1451 - DNA, 179 bp, Homo sapiens
tgaaatggtcacagatcctgggaggaaagataaggaactgtttacagaaaatccataatcatcttcaagggttaagaaggagtataaggycaggagcggtggctaatgcctgtaatcccagcactttgggaggctgagggggcagattgcttgagcccaggagttcaagaccagcctgg

SEQ ID NO: 1452 - DNA, 179 bp, Homo sapiens
agtcagaagaggccaggccaggaaagatgaagaaaataataaataaaggaatcttgaaggcagatggcaaaaagaagtttggaatggagyttggagtgaatggcagtgcttatcaaaagtgaaatgtaattccacttctcagtatctaccaggaaagagtaggcatgtaaagggatgta

SEQ ID NO: 1453 - DNA, 179 bp, Homo sapiens
agtctctgaatgattttcctttaataaaagtatcatgtttgttaatgattccattcataatctctcttttagaaaacataggccaggtgyggtggctcaggcctataaacccaacactttggaggtcgaggcgggcagatcacttgaggtcagaagttcgagaccagcctgtccaataa

SEQ ID NO: 1454 - DNA, 179 bp, Homo sapiens
attccttttctttctgcaggccagctttccagggcatgattaactacgtttctcctgttcttcatctttatagtttctgtgggcctcaarcaacactttctgcattttcccctctcgccccctactcatcactccctgaaaggtaagtagagttgggttgaagatgaaattcaacatgt

SEQ ID NO: 1455 - DNA, 179 bp, Homo sapiens
ctggcttcacaagggaagctgcagaccttcctggtattacagctcatgaacgcagggcagacccaaacagtgcgcagcggcaacacttaycacgaacagcaaaacaacaaacagctgtttgccctgctagttcaggtggcctgcttttattcccttatttggccccacccacatgttgc

SEQ ID NO: 1456 - DNA, 179 bp, Homo sapiens
agccgggcgtgttggtgggtacctgtaatcccagctactagggaggctgaggcagaagaatagcttgaacccgagaggcaaaggttgccrtgagctatgattgcaccactgcactccagcctgggcgacacagtgagactctgtttcgaaaaaagaaaaagaaaaaaatataatgtctc

SEQ ID NO: 1457 - DNA, 179 bp, Homo sapiens
cactgtgatgcaacgcttcactgaagggcatcctgatgcctagttgaggacatcaggggagccagggctccctctgcagggagggaatgsggcagggagagagagagagaactgggtctatcctgtgagcacctctgtcctgggcactgggtcctctctgcacccactcctctcttccc

SEQ ID NO: 1458 - DNA, 179 bp, Homo sapiens
ctggggccatgcgggcatccttatctccgacttccagcatccataactgtgagaaatgaattcctgttgtttgtaagccatccactctgygatgctttattatggcagcctgaatggatggtgagaatatattttgttcatctcactatgttctatttgtcttgcctgtttttctttat

SEQ ID NO: 1459 - DNA, 179 bp, Homo sapiens
cagctgcctgtagtcccagctactcgggaggctgaggcaggagaatcacttgagcccaggaggcagagattgcagtgagctgagattgcrccatcgtactccagcctgggcgacagagtgagactgtctcaaaaacaaaacaaaacaaaacattgtccagtgcagtggctcatgtctat

SEQ ID NO: 1460 - DNA, 179 bp, Homo sapiens
taaatttggtggcgaggctctatggaaattccccttcagactgatagttgacagaaggccaggcattcagaagaatcacgcagggaagawcgtgtttgttctaaaaaggcaaaccttcctactcagaaaagattttttttttcctgccaggaaaattgagaacaacagattgtagaact

SEQ ID NO: 1461 - DNA, 179 bp, Homo sapiens
cttatcacgaacagcaaaacaacaaacagctgtttgccctgctagttcaggtggcctgcttttattcccttatttggccccacccacatrttgctgataggtccattttacagagagttgattggtccgtttgatagagtgctgattggcccattttacagagtgctgattggtctgtt

SEQ ID NO: 1462 - DNA, 179 bp, Homo sapiens
agctcatgaacgcagggcagacccaaacagtgcgcagcggcaacacttatcacgaacagcaaaacaacaaacagctgtttgccctgctarttcaggtggcctgcttttattcccttatttggccccacccacatgttgctgataggtccattttacagagagttgattggtccgtttga

SEQ ID NO: 1463 - DNA, 179 bp, Homo sapiens
gtaacttgtacaagaccacacagctcatgtgtggtagggccaatatttgaacttagcattgaggttttatggtctatgctgtgcattctyagtagaggtggtattacttccaaggtggcgaaaattggttctggaaggttcttgtgctttatgtataaaacacagatatacatatagta

SEQ ID NO: 1464 - DNA, 179 bp, Homo sapiens
gcatattaaaagacaataattattcctcagaaggcaacatattttgcaaaaattttttcttctctagccaaccagagacttttataatgyagactagtgtttgcccctttgactcaatctcctctttccatgctatagtacaggaatcttcctgtacctactggagacatgcattagag

SEQ ID NO: 1465 - DNA, 179 bp, Homo sapiens
ctagtaaatggtggagcagagattctacaccaggtctttcttttctaatcatatgttctcattcctgcaagtcagactgcctcccaaggyacacttcttgtaatgaatcccacatgaatttgaaaagtttgaagacttttcaaccagagaagtacaatctgggcataaaaatgcagatc

SEQ ID NO: 1466 - DNA, 179 bp, Homo sapiens
actcgggcactcccgagattgaatcctgcatctgtcctctctggctgagtgatgggtgagcttgaaacctctgagcctaacattccttgyctgtaagatcgggattcattctcatgcctgcccacagaactgttttaaggggagcacctggcacagtgtgtcacatacagcaagcactt

SEQ ID NO: 1467 - DNA, 179 bp, Homo sapiens
gatgcctgtcttccctcagaagcacactgataaccccaatatacccacaattcacacttttttccttctctgaggtatgctgttttttgkcaaaacagaaaaaacacactactaggatatgaaaaacttcattctgggcctggttaggtcataaactacagaaccttaggtcatatatt

SEQ ID NO: 1468 - DNA, 179 bp, Homo sapiens
tccagccattccagccaccaactgacatcaaagagctcaactcatagtacacctgtcagcttatagaaccttgaggaataacgaattgtycatattttaagttagtcagctttggggcaatatttatgtagcagtaagtaaccaaaaccttggggctattagttccatgggcatataca

SEQ ID NO: 1469 - DNA, 179 bp, Homo sapiens
agtgcttatcaaaagtgaaatgtaattccacttctcagtatctaccaggaaagagtaggcatgtaaagggatgtaaaagcagagttttgrggtggggagagcagttttttttttttttttttttagagcgagagagctgtgtcatccaggctggagtgcagtggtgtgatcttggctta

SEQ ID NO: 1470 - DNA, 179 bp, Homo sapiens
gtgggtgcctgtagtcctagctactcaggaggctgaggcaggagaatggtgtgaacctgggagacggagcttgtggtgagccgagattgygccactgcactccagcttaggcgacagagcgagagtgtctcaaaaaaaaaatccagatatggtggtgcttgcctgtggtctcagctact

SEQ ID NO: 1471 - DNA, 179 bp, Homo sapiens
gtaatcaatgctaattgagctgtgtctcatttaaggatcacagcaaccctaagaaataagcatttttcattacagtctccttttcttttyttttttttttgagatggagtcttgctctgtcaccaggccagagtgcagtggcacgatctcagctcactgcaacctccacctcctaggtt

SEQ ID NO: 1472 - DNA, 179 bp, Homo sapiens
ctagtcagaaaagtcagtttagtgattggtgcccactcagcaactaacttccttccttccttcgttccttccttcgttccttccttcctycctcccttccctccttcctttctccctccctctctcctttctttcttttgttctttctttctcgctctttcttttgtacttatgtaaaa

SEQ ID NO: 1473 - DNA, 179 bp, Homo sapiens
taagtcagtgagtgagtgtgaagtcccaggacattactgtactctgctcttgactttataaacactgtacatttagactacactaaattkatttatttatttattgaggcagagtctcactctgttgcccaggctggagtgcagtgttgtgatctcagctcactgcaacctccacctcc

SEQ ID NO: 1474 - DNA, 179 bp, Homo sapiens
atatatattaagagtatgcgctcagccaggcgcggtggctcacacctgtaatcctagcactttgggaggccaaggcgggtggaccacaargtcaggagatcgagaccatcctggctaacgtggtgtaaccctgtctctactaaaaaataccaaaaaaaaaaaaaatgagctgggtgtgg

SEQ ID NO: 1475 - DNA, 179 bp, Homo sapiens
caggaagctctcttgctctctttctggtatatgaggcataaaaaacagtcagcagtctgtaagccagaagaaggccctcatcagaacctrgggccatgcgggcatccttatctccgacttccagcatccataactgtgagaaatgaattcctgttgtttgtaagccatccactctgcga

SEQ ID NO: 1476 - DNA, 179 bp, Homo sapiens
tttacttcatttaagatagtgtaattactgattgatgcaatggactgaatatttgtgttccccgactcccaccaattcatatgtggatayccttaccccagcatgacagtattaggaggtggggcctttgagaggtgattaggtcataagggagaagacttcatgaatgggattagtgc

SEQ ID NO: 1477 - DNA, 179 bp, Homo sapiens
tggaagtcagggagagcctgcagcctctggatggaggccaggtgagggccacttgggcaggccaccagcctgcatccaacacacaggtcygacgcccgcatctcctccaggggagctgggaaaccagagatccagcctctgctttgtgcagactcacaaagtggtccttgtatatccct

SEQ ID NO: 1478 - DNA, 179 bp, Homo sapiens
gctcttgccaggggcaccctctgaaaccagtttcttggttgtctggccatagattctatgtgtgaacatttgaggagatagttggcactyagtgtgtcactttttaaatttttgcctccttcattcagaaaaagaactttttatggctccaccatgactctctgaggttgctgggcaca

SEQ ID NO: 1479 - DNA, 179 bp, Homo sapiens
gagttttgcccttgttgcccaggctggagtgcaatggtgcaatctcagctcaccgcaacctccgcctcccgggttcaagcaattctcctscctcagcctcccaagtagctgggattaaaagtatgcaccatcacacctggctaattttgtatttttggtagagatgggtcttctccatg

SEQ ID NO: 1480 - DNA, 179 bp, Homo sapiens
gaatttccttaacctaataaagggcatctatataaaattgattacacttaaaacagcaaagattatacttcatgttaagatgttgaaagmatttcctttgagatcaggtactgttccctcactacttctgttctgcaagtagtagacatcgaagctggtggagtaacacaagaaaaaga

SEQ ID NO: 1481 - DNA, 179 bp, Homo sapiens
aagaaaagcttgaaagctaccatatacaacagaaccctgaaaggtaagggaattaatagtgccaggtacctccagaaatgagagtgaaartagggctaaaaacaggaagattggttgacaatcttaagatagagttagactctggtccctcccccactccatgctgcactccaggagat

SEQ ID NO: 1482 - DNA, 179 bp, Homo sapiens
gtccttcctcccttcattttcttatgtctgggcctgctgatcttcctctggcctcgccactttagggacacaggatcatcatggtggggrcatcccactgacttatgctgccacctgcacatgcgaggtgttcattgcctttgagggctctctccagccctactgtttccaggggctct

SEQ ID NO: 1483 - DNA, 179 bp, Homo sapiens
tgccaggtgtggcatgcagagtccgcagggtcccctcagctgcagtctcctggctctcttgcatcctgttgcctgaggggctcatgggckgctcttccaggaggttgcccccttggatgctctcagctgccagggagcccatgggacaattctcaaaaagccaagtgaacttgtggaca

SEQ ID NO: 1484 - DNA, 179 bp, Homo sapiens
tacacaaagactacaaaaaggccacacaaagtttaaacaaaaggctaaagaaagaccaaacaaaagccaaagaaagtttaaacaaagagygaaacaaagataaaacaaaggccaaagacaaaaacaaagagcaaaagaaaatctaaacaaaagctaagctaagctataaccatatctca

SEQ ID NO: 1485 - DNA, 179 bp, Homo sapiens
ttttttcacagttgaaaagtgtcatgaacattttggtacttatttcctggatcatatgtacaaatggctccctagagtatatacctgggrgtagcattgctgggtcataaggtatacaggtattcaactttataagacaatgccaaattgttttccaaagtgggtctatgaataattct

SEQ ID NO: 1486 - DNA, 179 bp, Homo sapiens
tttttaaaaattctttctttttgtgtgtcttagtttgggtctattaaaagctttgtcttcgagctctgaagttctttcttctacttgttytagtctattgttgaaactttccactgcattttgtatttctctaagtgagtcttccatttccagaagttgtgattgttttttctttatat

SEQ ID NO: 1487 - DNA, 179 bp, Homo sapiens
atctaggcaacactgcatgtggacggatcttcaaacacaggagtttgaccaaccagtctcctcagacactgatttctcagaaggagacckccatgtcaggggggtacaaggctgggccttttctgatccactgtgacaggctaactgttatctcagatttgaggtctctgacatctcct

SEQ ID NO: 1488 - DNA, 179 bp, Homo sapiens
aggcttttgtctcacagctcttaagattcttttctttgtcttgactttagataacctgatgtctatttgcctaggtgatgatcttttttrtgacacatttcagaggtattctttgagcttcttgtatttggatatctatatttctaacaaggccagggaagttttcctcaattattccc

SEQ ID NO: 1489 - DNA, 179 bp, Homo sapiens
acaccacaaagatgctcctcaagaagagcaaccccaagacacataatcatcagattcaccaaggattaaatgaaggaaaacatgttaagsgcagccagagagaaaggtcgggttacccacaaaggaagcccatcagactaacagtggatctctctgcagaaaccctacaagccataaga

SEQ ID NO: 1490 - DNA, 179 bp, Homo sapiens
agccaggcatggtggtgggtgcctgtagtcccagctactcaggaggctgaggcaggagaatggcgtgaacccgggaggtggagctggcartgagccgagatcacgccactgcactctagcctgggtgacagagcgagactctgtctcaaaaaaaaaaaaaaaaaaaagaaagaaaagaa

SEQ ID NO: 1491 - DNA, 180 bp, Homo sapiens
gttttaatttgcatttccctgataattaatgatgttgagcatttttttttcctgttcattggccatttatatatcttcttttgagaattgygtattcttgtcctttgcccacttttggatgggattatttgtttgttttcttgctgatttatttgtgtttcttatagatgctggatatta

SEQ ID NO: 1492 - DNA, 179 bp, Homo sapiens
ctttttgcttttttgacttagaataattctgaactggtgaggtgtgctcacaatgaggtttcctctaaaagttacttttctactttcttytgttagcaaagcagttgctgctacagattgaatgcatttgggccatccgtgggttactgggttaaggatttttgataggaaggctatgg

SEQ ID NO: 1493 - DNA, 179 bp, Homo sapiens
ggggtcatgttagtgggttctgtctggtggaatggagatggagacagaagtaatatacatgacttttaggcatagccttaaaccccctgmactttttctttccctttcatgttcaccataaaggtcactaactgaagatggtgacatcacgatatgggataatcctagatccttgaggc

SEQ ID NO: 1494 - DNA, 179 bp, Homo sapiens
attattaacttctttctttcatttgttatcctttttctagttttgttaggtctttaaataatttcttttcagcttttactgatataaatrttctatgcttccatgctgtgacttattccctgaatatgtatgtctttaactgcactctctaggttctgattaaactgttttttatcttt

SEQ ID NO: 1495 - DNA, 179 bp, Homo sapiens
gcaagaatatacccagaaccaagccctatccttggggacaaagagaaaacattctccccaccacccccagacacttgatcatgtaatcaktccttagaggaccttgttgggaggtgttaacagcccctgatgaagccatcagttaaacaaatgagtcaacctctgatctctccaggaac

SEQ ID NO: 1496 - DNA, 179 bp, Homo sapiens
cttaagtttatgtggctccttatgtgttaggtgagtctcttgaagacagtagatacttggttggtggattttttttttcctttctgcccytctgtatattttaagtggatcatttagggcatttacactcaacatcagtattgagatgtgaggtactcttctattcattatgctagtta

SEQ ID NO: 1497 - DNA, 179 bp, Homo sapiens
atggtgggaaatgatggagtttgccagtaatcaacacacgcaagatgtgtgctgtggtttccaagcagttagagccagatatttggataytgatattgacatgttcacaaagagttgaggataaataaagctgtttaattgtgtagagcaaatctaggcctggcattccacagaaggca

SEQ ID NO: 1498 - DNA, 179 bp, Homo sapiens
aaacacaaaaacgcaaagaggcagagggaaaaggtgattgagtttgttttcaagggcataataatattggtgggctgtgaaatctaagcyaggtcatgagggaagtggaatagatcccaagaaagtgtgtagttggtgggtgtggttagggaattgagcactgatcagcatgttaaatc

SEQ ID NO: 1499 - DNA, 179 bp, Homo sapiens
atttcttactgtcaaaatttcgcaaaggtgatttcaaaaccaaacatttttataaactttggtgcctcggcagctggatttgagctgatyctgccatttattaacttccttgacctaacttaactgatctaagcttctatattctcatttagaaataataacctctctttatttaagtt

SEQ ID NO: 1500 - DNA, 179 bp, Homo sapiens
gtgcagagatactgtatcaagtactttacaagaacaaattaatctaatcttcataataatttcttaaggaaattgaggcaaggaagagtyagagggaaggccaaggtaaattggtaagtggctaagttgacgttcactcttaacagtggggttcactgtgaaataggagttcagcagga

SEQ ID NO: 1501 - DNA, 179 bp, Homo sapiens
cggaacaccacagcgactagaggtaagggagcaccggatgtggctgggatgtgggcagcaaggggccagaggggccttgaaggggtcacrgaccatttaatgaaggtgtattgaaggccaccatgggccaggccctagttagggatggatcagaattatatagcatatgccaggggtca

SEQ ID NO: 1502 - DNA, 179 bp, Homo sapiens
cagacacagatatatttaaagctgccataattaagactgatattggtgccaggatagaccaatggactaacagagcaaatggagcaaggytttaagtgacgggaggagaagcaatgctattttgggagagaaggaagacagactttttatttcttcctttttccctccaccttcctctc

SEQ ID NO: 1503 - DNA, 179 bp, Homo sapiens
atgtttcccaaagagtaatttcattccacattcaccagctcccgtagagaccttagtctctaaaaccttgctaatcctctcaggccagcrgctgacgaccctttcttctgagtgtagatttacacagtaaaaaacaatggcttctgtgttcatcagtccacagcagcaaaaacacaaaa

SEQ ID NO: 1504 - DNA, 179 bp, Homo sapiens
cgcttgcttggcagatgggagactttcgggtcatcatggaaccattctttttcctcacccacccctgaggatcttaaaaacgactatctmtcagggttgttgtgagcataaaatgaggtgcgttttttcaagtgtccagtgctatgcctgacacattgtaagtgctcagtaagtattag

SEQ ID NO: 1505 - DNA, 179 bp, Homo sapiens
tcacccaggctgcaacctctgtctcccagattcaagctattttgtgccttagccactcaagtagctaggattacaggcatgcgacactaygcctggctaatttttgtatttttcatagagacggggctttgtcacattcccaggctggtctcaaactcctgacctcaagtgatccaccc

SEQ ID NO: 1506 - DNA, 179 bp, Homo sapiens
aataaagatgtgtttgagcctagttataatgatttaatatttatggtctgaaaccccaattacttttgtaccttttcattatttggcatstcttatttgctttttattttttgatgtacaattcttccagtatttagagtttgtcatattatttgttacaaatatatagattactaaag

SEQ ID NO: 1507 - DNA, 179 bp, Homo sapiens
tccataaggccctctgtggtcttaggctgacttcttgggaataagcattctcttctctttccatttttccttttcatatcaactttaggrtgtgacctcagcctaggtgctgccaaaacatgaggcatgctgattccaccatgttccagaacctactgctgcccctttcacagccctgg

SEQ ID NO: 1508 - DNA, 179 bp, Homo sapiens
cttagatttgcataaaggagcaaagactgccagaaatgataaatacatggttaaacagaaaagcttttctcattcataacagaacaagartaataacagtgtggtgtgggatatatagcttatataaaaataaagtgggtaacaaaaataacacaaagacctggaagacggtaaatgaa

SEQ ID NO: 1509 - DNA, 179 bp, Homo sapiens
ctggagctggaatttgagggtcaagacagtctctgagccaagatgttgggtttgtggcagacccaagactatgcctgccttggcttccargccccccctggagaacttctgtggttcgttcttgtgatagcattgtcctttaggatgccatcattatgtgaatgtttcctgctatgatt

SEQ ID NO: 1510 - DNA, 179 bp, Homo sapiens
gcaaagggacaagtgaaggcacccagatgaccatccattgttcagggcgtggctagctaacttgtgctgaatgagggtggcaggatcaayccatgcattaaatgttaaatgtaacaatctcatttttatctttgtagataacacatatgaaaagaaaagtctttttttttttttttgcg

SEQ ID NO: 1511 - DNA, 179 bp, Homo sapiens
ataatttaatggatcaaagtaagtatgtattcctaagatatttgatactccctatcaaattgctttcagaggccaggcacagtggttcaygcctgtaatcccagcactttgggaggccaaggtgggaggatcacctgaggtcaggagttcgagaccagcatggccaacatagtgaaacc

SEQ ID NO: 1512 - DNA, 179 bp, Homo sapiens
tctgtgactccctcagggagtgagatatctcggccaggggaccggaaatggaacacactgccatgactagcccggcgttttccagaggcraggcctagaaaagactgggcattgccccaaaggagcaagaaggctggaaactggtcctctgggaaatctagagcccaacacttccctct

SEQ ID NO: 1513 - DNA, 179 bp, Homo sapiens
atcttgtacttggcttcctcctaactggtttccctgacaacatacttcccctcttatatctacaagtatccagagtaacttttataaaaygcaaatgtaacttccctgcctccaatcctttaatggcacctcactcctcttagcatgaagtcccatatccttaatgcagtctaggagtt

SEQ ID NO: 1514 - DNA, 179 bp, Homo sapiens
aaaacaaactgtttgtattcaatgtttgctgtttgatgactaatagcaaaacaaaaaccaaaacaaacaaacaaaaaccaagaaacctawctggccaagaaagaaattgtgggaatagcagcttggtcaaattctatgccatgaaaaatgttagaagtacagactctattacaatgaac

SEQ ID NO: 1515 - DNA, 179 bp, Homo sapiens
taacctaaggtttcctctcctcagattttctttaaaacatcattgtttctctggcctttcttactctactgtcacagcatcttccttgargggaagtctaccctaccccaacatatttgcctattacttattttcttcctttttatcagttcacactgttataaattagcatcactccc

SEQ ID NO: 1516 - DNA, 179 bp, Homo sapiens
tcagggcatttgaaaaaaaaaaaaagagatatcctactcatggcattccctagatcatggacagactccctttcctaaccagacagatasgcaccccctccagttcatatcaacttcacatccccctctccaaaaagttcagattcaggtatcatgcccccagcccctgcagcaaatag

SEQ ID NO: 1517 - DNA, 179 bp, Homo sapiens
attttttgtattttagtagagatggggtttcaccgtgttgcccaggctggtctcgaacttctgagctcaggcagtctgccagcctcggcytcccaaagtgctaggattagaggcgtaagccactgcacccagctcaagccaacttttgattgataaattgttccatctttttcctaatg

SEQ ID NO: 1518 - DNA, 179 bp, Homo sapiens
gatgggcactgtgtgtcagacagtgaacaggacagccaagaaaactgccctcagggcatttgaaaaaaaaaaaaagagatatcctactcmtggcattccctagatcatggacagactccctttcctaaccagacagatacgcaccccctccagttcatatcaacttcacatccccctct

SEQ ID NO: 1519 - DNA, 179 bp, Homo sapiens
tgacccccactcccccatgcccaccccagggagacaaagcgaccacagctgggtgcggagctgcctccggcgtccaggataaccaaacakacgaaccggaccccagcccgcgccggcgtcttcccacactcggcgcccagaccctcgggcctcaccttgaagccgccgcggcccgcccg

SEQ ID NO: 1520 - DNA, 179 bp, Homo sapiens
agatgacaggtgggcctgggcagcagttgaaggaatatttttgccatcatttattcacatgtaaccattagacctacttctaaggtggaytggaatctggtggaagaaggctgcctgctgtcctctggaaagtacaccctcctctttcaggcctctgagagagtgtgggtgccctgtct

SEQ ID NO: 1521 - DNA, 179 bp, Homo sapiens
aaatatctcagcctaataagggaactgggcaggtggggataactaaaaaagagttcataaaagagtgttgtccaagttggcaccagagtkggggagttttcaggggtttagaagcctggccgtcaatacccacaacagtcatggaggcaagggaaacaggcccttgaaaagaaggtaat

SEQ ID NO: 1522 - DNA, 179 bp, Homo sapiens
gtcatgggagaaatgcaaatcaaaaccacaatgagataccacctcacgccagctagaatggtgatcattaagaagtcaggaaacaacagwtgctggagaggatgtggagaaataagaacacttttacactgttggtgggagtgtaaattagttcaaccattgtggaagacagtgtggtg

SEQ ID NO: 1523 - DNA, 179 bp, Homo sapiens
gaagctacgactcccccctgagaaggtgaaccccctggggggtgcagtggccttagggcacccactgggctgcactggggcacgacaggycatcacgctgctcaatgagctgaagcgccgtgggaagaggtaaggctttgctcctggcggtggggtcatagggggatatccaagttagg

SEQ ID NO: 1524 - DNA, 179 bp, Homo sapiens
gaagggcaaagtggctacaaacagcagatcagacaaggccaggttcaggaggtaaatgtcggtgacactcttgggcttcttgctgttggygagggcaaacactaccaacaaatttcccaccaggccaatggcaaagatgacggagtagaatatggacaggaacacagtcccaaagacca

SEQ ID NO: 1525 - DNA, 179 bp, Homo sapiens
aaaagtgggaaaggggtcggggtgcagagatacgaggttggggcatggaaataagggatcagggcacagagatataagaggttggggtgyggaaataagggatcggggcacagagatatgaggtcggggcatggaaataagggattggggtgcagagataagaggttggtgcgtggaaa

SEQ ID NO: 1526 - DNA, 179 bp, Homo sapiens
gaaaccctgagaatattgaacgtctttgccagacaaggaaaagtgggactggggaaaaggccagttatgtgaatcctcttaaaatagggwctaaaattttataataaaaatgtattttaaaagttttgattgagactttgcctgaaatgtgaaactgaaaattacgaaattaggtttat

SEQ ID NO: 1527 - DNA, 179 bp, Homo sapiens
tgaggtctagaaactgggtgtgccttccagcatgttcagagcatgcaagacatcttagttcttacactcctaggcctgttacagcacttratgagctgttttaattcacctattagtctgtttctcatacagcatcagtgtccaagcccagttctgactgtatctcccagggctgagta

SEQ ID NO: 1528 - DNA, 179 bp, Homo sapiens
cagcttaggcagatgccatcaaccagcgtttcatggcacagctgtgtctcaggacatgctttatttggtctttagagtgtttttaaaaaytggattagtagccaatattaaagacatttgcacaaaaatctggatttctgacttttttggaaaattagtaactctgacaataatggaca

SEQ ID NO: 1529 - DNA, 179 bp, Homo sapiens
tttaaaacatcattgtttctctggcctttcttactctactgtcacagcatcttccttgaggggaagtctaccctaccccaacatatttgmctattacttattttcttcctttttatcagttcacactgttataaattagcatcactcccgccgccaaccacccaaatatcacctttgtg

SEQ ID NO: 1530 - DNA, 179 bp, Homo sapiens
ccaggttaatttgatgaaggaatccaactttagatagtgtggttggggaggtcccctctaaggaggtgacaagtgcattgaacacagagkttgagaataagtgagctaagtgaagactaaaggaaaagtattccaggcacagcgaaaaaaacttcaaaggcccaaagccaagaagttct

SEQ ID NO: 1531 - DNA, 179 bp, Homo sapiens
tgccatgagcaggtaaacatgctttaattatctcgcggctttgaaaaagtctctctggaccccatgctctctttcattactgcttctttracagtaaaattccttgcaagagttttctacacttaaccttctacagctccttacctctttttttctctgcagcccctggaatctgactt

SEQ ID NO: 1532 - DNA, 179 bp, Homo sapiens
ttcgtttttttttttttttttttttttttgagacggagtcccgctgtttagcccaggccggattgcagtggcgcaatctcggctcactgyaagctccgcctcccaggttcacgccattctcctgcctcagcctcccgagtagctgggactacaggcgcccgccaccgtgcccggctaat

SEQ ID NO: 1533 - DNA, 179 bp, Homo sapiens
cactcttttttttttttttttttttttttttttttttttttttttttttgagacggagtctcgctctgtcgcccaggctggagtgcagtrgcgggatctcggctcactgcaagctctgcctcccaggttcacgccattctcctgcctcagcctcccaagtagctgggactacaggcgcc

SEQ ID NO: 1534 - DNA, 179 bp, Homo sapiens
tcggctcactgtaagctccgcctcccaggttcacgccattctcctgcctcagcctcccgagtagctgggactacaggcgcccgccaccgygcccggctaattttttgtatttttagtagagacggggtttcaccgtgttagccaagatggtctcgatctcctgaccttgtgatccgcct

SEQ ID NO: 1535 - DNA, 179 bp, Homo sapiens
gagccccagaactgcttggaacttagagatgctaagtatctctgaaagcaaggtttgggggagggtgataagtagggctgaaagaattgyttgaaagttttttacaggaaccagttgagctttctagatgctgctttatgccatccattcaatgagaaactgtttctgctccagaaatg

SEQ ID NO: 1536 - DNA, 179 bp, Homo sapiens; identical to SEQ ID NO: 1486

SEQ ID NO: 1537 - DNA, 179 bp, Homo sapiens; identical to SEQ ID NO: 1488

SEQ ID NO: 1538 - DNA, 180 bp, Homo sapiens; identical to SEQ ID NO: 1491

SEQ ID NO: 1539 - DNA, 179 bp, Homo sapiens; identical to SEQ ID NO: 1487

SEQ ID NO: 1540 - DNA, 179 bp, Homo sapiens
cactccagtctgggtgacagagcaagacttcgtctccaaaacaacaacaacaacagcaacaacaacaacaacaaaaacaaaaacaaaaamaaaaaaacctgtactaatatttttagagagttaagaggtgagaagaggctccacgtatagaacaagagcagaaggatgtaaaaagtacc

SEQ ID NO: 1541 - DNA, 179 bp, Homo sapiens; identical to SEQ ID NO: 1479

SEQ ID NO: 1542 - DNA, 179 bp, Homo sapiens; identical to SEQ ID NO: 1490

SEQ ID NO: 1543 - DNA, 179 bp, Homo sapiens; identical to SEQ ID NO: 1493

SEQ ID NO: 1544 - DNA, 179 bp, Homo sapiens; identical to SEQ ID NO: 1498

SEQ ID NO: 1545 - DNA, 179 bp, Homo sapiens; identical to SEQ ID NO: 1424

SEQ ID NO: 1546 - DNA, 179 bp, Homo sapiens; identical to SEQ ID NO: 1421

SEQ ID NO: 1547 - DNA, 179 bp, Homo sapiens
gcctaggttctcttctagggtttttatggttttaggtctaacatttaagtctttaatccatcttgaattaatttttgtataaggtgtaargaagggatccagtttcagctttctccatatggctagccagttttcccagcaccatttattaaatagggaatcctttccccatttcttgt

SEQ ID NO: 1548 - DNA, 179 bp, Homo sapiens; identical to SEQ ID NO: 1419

SEQ ID NO: 1549 - DNA, 179 bp, Homo sapiens
tagatcgcgtcactgcactccagtctgggtgacagagcaagacttcgtctccaaaacaacaacaacaacagcaacaacaacaacaacaamaacaaaaacaaaaaaaaaaaaacctgtactaatatttttagagagttaagaggtgagaagaggctccacgtatagaacaagagcagaag

SEQ ID NO: 1550 - DNA, 179 bp, Homo sapiens
ggcagcaaagaaggatacacctgcttgtttaaggagggatgatttgttgctctggtaagtaaaatcaacttctttgggagagcagcttcrcaggtagcagaaagagctctgaccagggaagcaatctaggatttatttttggttagtcattttggtcagcaaataatccactgagcact

SEQ ID NO: 1551 - DNA, 179 bp, Homo sapiens
agatctgtcctagagtctcgttgcctcctgaaccatgcacccccttcaacctctggatgccaacacttgtcaggaccttgggaagattgytggatactcccctttgttttgtcacctctcttcaagtctagatgcagggctcccagttaatactgagagattcctgagagcaggcggcc

SEQ ID NO: 1552 - DNA, 179 bp, Homo sapiens
ataatcttctttcatctttccccattaaagcccccttcttcccctaaaatgctccctttatgagttattgtatcagcatatcttaaggcrcttataccagaaccatatgcatcatcaagtcctgaatcttatgccccttagatagctctcatatccttccatttcccatcagccccact

SEQ ID NO: 1553 - DNA, 179 bp, Homo sapiens
ggaacatgtcagaggaaaccttgtcacctggatagttcagttgattgccaacctttggccacagggctagacaaagctgtcctaagttcmcttttccacatgcaaagttgtgacctaaggaggctactatgcacaccagtactggaacatacttggtaagtggttgttgaatgaataag

SEQ ID NO: 1554 - DNA, 179 bp, Homo sapiens
ctcaggtggtctatagtatgtacaaaatctaaacattgacttcataccaaactctgatcataccgatttattccactcaccttccttaaytcctttttattactaagctactaaagtggagaatcttgccaattggggttctccttactaatccccttatctcacagaactgaagtttc

SEQ ID NO: 1555 - DNA, 179 bp, Homo sapiens
ctgtctttctgcatgcatctgggaggcagcttgagacttgggacacatgaacctcactgtgtgtgagtgtgtgtgtgtgtgtgtgtgtgwgagagagagagagagagagagagagaaagagagagagagagagatgcaagagagatagagtgaaacaaaaatagaccaagagaaagaaa

SEQ ID NO: 1556 - DNA, 179 bp, Homo sapiens
caagaacaaaaacaaactgaaatccccggaaatacacgcaacccaaggctgtgtttcagcaccaaggtggggaggttgatgaaatgctgytaagttgtatttagatactctcagctcttgttactaaatcagtggcaaattaaatctacagctacaccccgacatgaaaagtaagcagg

SEQ ID NO: 1557 - DNA, 179 bp, Homo sapiens
acaggcaggagagaaaggatcatatcaaccttctcccctcctctgcagatagacaaaccaagcccagcatcaaggagtgtcttgccacawccagtgtcggaacggtgggactgagttccattgctgactccctgcctgggtctctaaagcaaagccagtttctgttctccagggatcca

SEQ ID NO: 1558 - DNA, 179 bp, Homo sapiens
ttagtgtcatgagtacctgggattacagtcatgcaccaccatgcctggctaatttttgtagtttttttgtagagacagggttttggtatyttgcccaggctggtcttgaacttctaagctctagcaatctgcctgcctcagcctcccaaagtattgggattataggcaagagctgttgt

SEQ ID NO: 1559 - DNA, 179 bp, Homo sapiens
acacactgcccacatgcggggtatgtgccaaggctttcctcactaggcagatggttaacaagccccccaaccagtctttattcatccccrcggatctgctgctaagcatctactggggagcccaggtgactcctaaaatatgcaagcaatgatgctaagagtgaatattcattgagccc

SEQ ID NO: 1560 - DNA, 179 bp, Homo sapiens; identical to SEQ ID NO: 1506

SEQ ID NO: 1561 - DNA, 179 bp, Homo sapiens
tagctttgccttctgtttgcacatagaaggaaagaaaagtaaaattacagcaagttgactcaaattggtgaaaaaatctgaataggcccygcagagaactacctagagtcctgggtttggaaagtaagaagaaaagaaaatcctcctaccccacagtgtgagagacctacctgcctatg

SEQ ID NO: 1562 - DNA, 179 bp, Homo sapiens
gacagccctccctgaccccacccctcgccagctcccttctatctctctcctccctcttcaaccatcaaactctttgaaagagctgtctayacatgctgtctccacgtcctcacctccagctcgcttctcaacccactccaaactggcttccattcccaccaagtcactcattcattcat

SEQ ID NO: 1563 - DNA, 179 bp, Homo sapiens
gtactaggacaaaaggatcattggtccaataaaattcaattatcattattcattgtcatggctcccattttcttatatatttttgtctgkttttgggagattatccacatccattatccacttgtctcatgacaaacagattcatgctttgtatttttacaatggaggccattcattac

SEQ ID NO: 1564 - DNA, 179 bp, Homo sapiens
ttgtgatttgcttgtcatttcctttgtccattgttgtggttctgtttttatcattttatcactatccctcttttcctattgatgtgtaamtcttcaatattgcctggattccatgtatttctggttaaatacttatcataatatcaatttccagtttgtggtagtgagttcacttagtt

SEQ ID NO: 1565 - DNA, 179 bp, Homo sapiens
tttgatcataaaaggcgaggactggaagggacctgaagtccagctatctctggggaccatagaccccaagggatccttagggagttgttwtctctccttccctcggacttcctgaaacagaagctcagcaattagacatctaataggcacctaggctccgcaagcaagtgggggctttc

SEQ ID NO: 1566 - DNA, 179 bp, Homo sapiens
ttatccccatcaagctaccactgactttcttcacagaattagaaaaatctactttaaatttcatgtggaacaaaaaagagcccgcatagycaagacaattctaagcaaaaagaagaaagttggaggcatcacgctacctgacttcaagctatactacaaagctacagtaaccaaaacag

SEQ ID NO: 1567 - DNA, 179 bp, Homo sapiens
agattataaattttaacaatttataatttagcaatcttttctttcatgatataagctttttggattgttgaaggccttcccaatcccaaratcttaaagcttttttgcttgtttttattctaaaaactttaaagttttgctttatcacatttaggtgttaagtccaattcccctgcatc

SEQ ID NO: 1568 - DNA, 179 bp, Homo sapiens
catattagtaataaagctattcaaacagaacaaaatatagctataacacaactacattgcctgttatcaatattttaacgacaagtttartacaatgcagttcagctacaacttgctgacccagtgaagccaccagtgctgttcatcacacctaacttgctgctcagtccaacccaatg

SEQ ID NO: 1569 - DNA, 179 bp, Homo sapiens
aaatgtcaccactgagagtagcaaatagtaactacttctgtgaagagggaggagaatcaaagctgaaccatttaaaatttcttttttttyttccttaaaatcatgagatagagtatcaaagctgaaccatttaaaatctcttttttttcttaaaatcatgagcacacacagaaaatgca

SEQ ID NO: 1570 - DNA, 179 bp, Homo sapiens
gcaagcttcttatgaaaagcaagccaccccacctcaccccttcagcagcatctaaatgcctgggtggtcagagaaagaccttgtttagcrctaggggtggggaggggaagcagctgagaagatgccccaagaaggccatgcagcagggaataagcttcttgattgaggccgagagtctg

SEQ ID NO: 1571 - DNA, 179 bp, Homo sapiens
tgacctgcaaatccagtatccacccccctacccttttctcctcccagctcaaccagccttcaggttctctccgttcacttggtttgcctrcaacccagtcatagcctctctgatgaagctctgggagcccaggccctctgcacaggccttacccatgacctctgatcatggaccaggtg

SEQ ID NO: 1572 - DNA, 179 bp, Homo sapiens
atcttcagtgtgtacctacacaatagagctgtcctaggcccatcttctacatcttgggttctcaggccagaggggatctgcttagtatcytgcccacccagcttgggccagaactcaggtcttttagctccttgctattcaaagtgtggtttgaggaccagcagccttgggatctccta

SEQ ID NO: 1573 - DNA, 179 bp, Homo sapiens
tcactggggcaatgggccgagcactttatagccatcatttcatttagtccttcccattgtcctaggaagtgagcagatgccatcatcctyatcttccagaagaggaaacagaggtgaggtaacttacccaagttgccacctagtgagtgagaagctgggatttgactcagacgttcggg

SEQ ID NO: 1574 - DNA, 179 bp, Homo sapiens
cacttactttgtctcaggcaggacctaaacatttgacaagcagcatctcatttaagcttcaaaataatcctaccaagtaggcattaccaytcagtttcatagatgaataaatggcggctcagagaggtttgggaactgatcttaggtcccacagcttgtggagtctcactctttctttc

SEQ ID NO: 1575 - DNA, 179 bp, Homo sapiens
catccagttgcatcttttcaaaattaccacttacattcaaactgctttcaaatatatatatatacatatatatatgtgtgtgtatgtgtrtatatatatatatatatatatatatatatatatatgccatctttgtcatctaagttctagacccctatatcctaaagtcaacttcctac

SEQ ID NO: 1576 - DNA, 179 bp, Homo sapiens
gtctttctgcatgcatctgggaggcagcttgagacttgggacacatgaacctcactgtgtgtgagtgtgtgtgtgtgtgtgtgtgtgagwgagagagagagagagagagagagaaagagagagagagagagatgcaagagagatagagtgaaacaaaaatagaccaagagaaagaaaaa

SEQ ID NO: 1577 - DNA, 179 bp, Homo sapiens
tgacacatgtataagtattcattctaatcgtgtacagtatttcattgtatgagtacaccacaatttatttatccactttataaaattaayggacatttatgttgattccagtttcccctatgactaaaagtactgtaaagaactttcttatacatgtttccttgtacagatgtgtgaga

SEQ ID NO: 1578 - DNA, 179 bp, Homo sapiens
tgtttagcactaggggtggggaggggaagcagctgagaagatgccccaagaaggccatgcagcagggaataagcttcttgattgaggccragagtctgagggggcttgcaggaggtctgcccttcagatccaccctcatttccatttctaaaacatcacagaatcctgacagtgattct

SEQ ID NO: 1579 - DNA, 179 bp, Homo sapiens
ctggccaattatgaacatttttatcatctctatcaagcagttctactatgtgacatttttaaggggatagcctgattgtgtctgcgtgtrtgtatgtctgctgactcttcctcatggtggaatatttccttctgtgttttataatttgggaaatccagcctgacctaggctaaaggtgt

SEQ ID NO: 1580 - DNA, 179 bp, Homo sapiens
ttcaaactgctttcaaatatatatatatacatatatatatgtgtgtgtatgtgtatatatatatatatatatatatatatatatatatakgccatctttgtcatctaagttctagacccctatatcctaaagtcaacttcctactggacacccctacctagatgctccaagggcacctg

SEQ ID NO: 1581 - DNA, 179 bp, Homo sapiens
cgagatcacgccactgcactctagcctgggtgacagagcgagactctgtctcaaaaaaaaaaaaaaaaaaaagaaagaaaagaagaaatyaaactcattgttattttcacatgatgtgattatgttagaaaatttaaaacattgtatagataaattattagaattaataagagacattt

SEQ ID NO: 1582 - DNA, 179 bp, Homo sapiens
cagataaacaaagaggttatggccagaaggcacttactaaaagaaattctaaaggaggtacttcaggtagatagaaagtgatcccagaartaatatgtaatgtgtaatatacaagaatgtgaaactgtgctccaaagggttgaagaaatcaataactaaatttttaggcttacaggata

SEQ ID NO: 1583 - DNA, 179 bp, Homo sapiens; identical to SEQ ID NO: 1434

SEQ ID NO: 1584 - DNA, 179 bp, Homo sapiens
gacttcgatatgttctatgagatctgggagaaatttgacccagaggccactcagtttattgagtattcggtcctgtctgactttgccgaygccctgtctgagccactccgtatcgccaagcccaaccagataagcctcatcaacatggacctgcccatggtgagtggggaccgcatcca

SEQ ID NO: 1585 - DNA, 179 bp, Homo sapiens
actacctaggtattttaagttgagaatttaatttagagcaattctacaaagtgctctgcagaattaaatgcaaatacctctggaggaacstgcctttatctcaggtttcaaactattccctcaaaaattgtttaagagttgcagtaaaaaaacaaacaaaaacagaaggaatgagtcat

SEQ ID NO: 1586 - DNA, 179 bp, Homo sapiens
tttgaaactgcaaatgtccatgatttcatggactcagcattcataagttgatttaattgaccaacgaacctaccccccagaactccagcmgtgcaggtgcatggcagtgtgctagcctatgaggtgtatgaagagaggtgtgtgggctcttgctctcatggaaccaatggtttagttac

SEQ ID NO: 1587 - DNA, 179 bp, Homo sapiens
ctttgaaactgcaaatgtccatgatttcatggactcagcattcataagttgatttaattgaccaacgaacctaccccccagaactccagscgtgcaggtgcatggcagtgtgctagcctatgaggtgtatgaagagaggtgtgtgggctcttgctctcatggaaccaatggtttagtta

SEQ ID NO: 1588 - DNA, 179 bp, Homo sapiens
gaccctgctccctcccacaaggacaggagaggaagggggagctggctggtgcagtccccagagcacagtgtcttccctgaatctgggtgrgagtttccccaagccatcaagagaaaaacattaccaagcggaagctccgcagcacagacaggcttcccttcttggccacgcccagctct

SEQ ID NO: 1589 - DNA, 179 bp, Homo sapiens
gttcagagcatgcaagacatcttagttcttacactcctaggcctgttacagcacttaatgagctgttttaattcacctattagtctgttyctcatacagcatcagtgtccaagcccagttctgactgtatctcccagggctgagtagtaccatgcctggcataccagagctactcagag

SEQ ID NO: 1590 - DNA, 179 bp, Homo sapiens
tgaatgccctgagttactgagaagaggttagcgagggttgatataccagcttaaggtagtaaggaatagtgccaagtatttaaaaatatrtattatcaaatggctcaaatgtgctttaaattagttggtgccaaaaggagcgtgtcatttccctgtgataccacttgtggggaaaagct

SEQ ID NO: 1591 - DNA, 179 bp, Homo sapiens
catgaatggaaagatggggagctggacagaatagatgaatggaataaattagtgaatgactggaaggttgataggatggatgaatggatratgaatggaagggaaagggatgaatgaacagataagtggaagaaaggaagaatagatggataggttgaaacaagaatggaaagatagaa

SEQ ID NO: 1592 - DNA, 179 bp, Homo sapiens
acaagcatactgcactcatttagaagtgtgagtgtgtgtattatacttgcacatacagacttctagaaccttgacttattctccttaaayaccatacataaaacacaaacacaatttaaatacaatttaaagtatgccgtggtcaagaaccagtgaaaacctaaatccatattcacaaa

SEQ ID NO: 1593 - DNA, 179 bp, Homo sapiens; identical to SEQ ID NO: 1494

SEQ ID NO: 1594 - DNA, 179 bp, Homo sapiens
ccacagatggtgggctgaattcaggctcagcttatcctggcagttaggtgggatgcacacaggagcttcagaaaagaagggctttatacytgagtggcagagccccaagcaatgtccattctttggatgagtggcttattgcaccaggacaaagaaccggaatggaagggaccctcttc

SEQ ID NO: 1595 - DNA, 179 bp, Homo sapiens
aatgccacctcccataggaagaattctcaaccaccccaccccaagagtggaagaaggctcatgtctctgtgtctccaagatactaattgyccccagcagtgctcaacacattcacccttataatacatttatttccatgtgtgtcttgtctgctgaaagactaaagtgtaagatcctgg

SEQ ID NO: 1596 - DNA, 179 bp, Homo sapiens
gatgctccaagggcacctgaaacccaatatatcccagactcaactcataatcttctttcatctttccccattaaagcccccttcttcccytaaaatgctccctttatgagttattgtatcagcatatcttaaggcacttataccagaaccatatgcatcatcaagtcctgaatcttatg

SEQ ID NO: 1597 - DNA, 179 bp, Homo sapiens
ttgtcaaactcctgttggtttgggccaaactttcttaagcataatccctcttaaagaggtggcctttataaatcctattacgactctggyagcatgaagcatccttcaggtgtctcatgtgtgtaatgaatataacatccaaccagagaagatgatgtgccctatgctcagaaaacttt

SEQ ID NO: 1598 - DNA, 179 bp, Homo sapiens
cacctgaagcaatgccacacacacaacaggggctcaacaaatgcttgttgataagagaataaatgaaagaagagagaaggaggaagcttmacagttttcgagaataaatgaaaaaaacaaactgtttgtattcaatgtttgctgtttgatgactaatagcaaaacaaaaaccaaaacaa

SEQ ID NO: 1599 - DNA, 179 bp, Homo sapiens
ccagattttcttaaaaacgtctttgtttctcctgcctttcttactctactctcacagtatcttccttgagcggaagtctatcctaccccragatacctgactattccttattttcttcctttttatcagtttacaccactataaagtagcatcaccccccagatatcacctttgttaat

SEQ ID NO: 1600 - DNA, 179 bp, Homo sapiens
ctcaggcactgggggtgttgtgagctctgcttttccaagctctcagccatggaggtgggtgagatgggcctttttgatcttttgcctaamgtctttctgctcatgccttcctccagtggccaaagcagcaggcagagctgaggggtcctcatcccttagctttgtctcacattctgttc

SEQ ID NO: 1601 - DNA, 179 bp, Homo sapiens
caggctgggtcttcagtaagaacaagcttagatcaaatggggccagaagtccccctaccacccccacaccagcctcgatgatgatctcasaagctcctttttaaggccagtgggatcatggcaactctgccctgggatcctctaaagatgggctgactctgtttacctcgactgatcca

SEQ ID NO: 1602 - DNA, 179 bp, Homo sapiens
ctatgtatccacaccctttccaatgtgacttttcagctctttccattgagtgatgaagtctatttctctgtctcttggatctctactggrctgcaacttgctttagtcaagaatgtatcagaatgtacaaaaggtacattgtgttggttctaagcctaggcctgaagaagccttgcaaa

SEQ ID NO: 1603 - DNA, 179 bp, Homo sapiens
cctttatctcaggtttcaaactattccctcaaaaattgtttaagagttgcagtaaaaaaacaaacaaaaacagaaggaatgagtcatcargagtgaatgagatcttgaagaaaccacagatgtggaaatagtcattccatttcttcagatgatagaattattagtcagagataacagta

SEQ ID NO: 1604 - DNA, 179 bp, Homo sapiens
gagcacagtgcctgtgggaaacaacagagactgtggctactggtggcacctctgtcttccagccagcatcactgtgcaggggttggcggkggggggggggtctctatatggcaaggagccaaggagaggcggcccttccaggattgcgtccactgggcatgctaggactctgcctgctc

SEQ ID NO: 1605 - DNA, 179 bp, Homo sapiens
ttctcatcttggggcagtggacaacatctgttgctcccaccagctttgaaactgcaaatgtccatgatttcatggactcagcattcatawgttgatttaattgaccaacgaacctaccccccagaactccagccgtgcaggtgcatggcagtgtgctagcctatgaggtgtatgaagag

SEQ ID NO: 1606 - DNA, 179 bp, Homo sapiens
agtggggcattgctgacagagagaaatgcaactcttcctgcaacagcaatcacagggcaagggttagcactgatattaaagtgatgggcygtgagtagtgttggcttttgtcaggaggccagagctgggcagggaacaggaaatataaggcttaccactacagcagaaaccagaaactc

SEQ ID NO: 1607 - DNA, 179 bp, Homo sapiens
tctctcgggatctcagttacgcaaatctagaacagcgcctatctacctcaggggtatggaaggcattaaatgaaaggataataggaaaayactttatacctttattgccctgacattttcttataaacatgagaggttatctgggattcgattcctattaatcagagtcggcacccttg

SEQ ID NO: 1608 - DNA, 179 bp, Homo sapiens
catgcaacctatctccagctgccttatttatttatttatttatttattttgagacagagtctcactcggttgcccacgctggagtgcagygtgatctcggctcactgcaacctccacctcccgggctaaagcaattctcctgcctcagtctcccaagtagctgggattacatgcgtgca

SEQ ID NO: 1609 - DNA, 179 bp, Homo sapiens
taaaattcattcaaaggttagcatccgtgtgagagagccacttctctcccatggcattttgcctctctcctgtgtcttcctgtccccacrtgccttcacagctcagaccatcaggggaagaaccgtgatctgcacagtcaggaagatgactccagtaggcccttgtgctccaaaaactg

SEQ ID NO: 1610 - DNA, 179 bp, Homo sapiens
acattcaaactgctttcaaatatatatatatacatatatatatgtgtgtgtatgtgtatatatatatatatatatatatatatatatatmtatgccatctttgtcatctaagttctagacccctatatcctaaagtcaacttcctactggacacccctacctagatgctccaagggcac

SEQ ID NO: 1611 - DNA, 179 bp, Homo sapiens
actccagtctgggtgacagagcaagacttcgtctccaaaacaacaacaacaacagcaacaacaacaacaacaaaaacaaaaacaaaaaamaaaaaacctgtactaatatttttagagagttaagaggtgagaagaggctccacgtatagaacaagagcagaaggatgtaaaaagtacct

SEQ ID NO: 1612 - DNA, 179 bp, Homo sapiens
ctgctcagtgtctggctggctgtccaacctctccaggaagctgacatacctacctcagcagggacctgaggaacagactcatctttccaygtctcacccagggatggagccaggtcctcagaagatgttccagtgcctgggctcctgggtgtcaggtggtccccacacctctcgacttg

SEQ ID NO: 1613 - DNA, 179 bp, Homo sapiens
catttccttgcaagagggatgctgagcaacaggaaatagaatacccaaaagtaaaacacaactcaagagaaccattttggcaggaaaggkgagtcaaaatatatgtctatacacacacacaggggctccatatcccctgtccctatatgataccaagggtccaaccagaccttggtccc

SEQ ID NO: 1614 - DNA, 179 bp, Homo sapiens
cagatgggcacacaggggagcagcccttaactgaagttccagaggtgggaatggggtgggtggagtgtgaggaaggtgggaaaaccaggraggaggtaaaaccttggcagagccctgaggaatgagtgtgagttgagtaaagagaggaggaaggatatcccagaagaaggggcagcaca

SEQ ID NO: 1615 - DNA, 179 bp, Homo sapiens
agttccagaggtgggaatggggtgggtggagtgtgaggaaggtgggaaaaccagggaggaggtaaaaccttggcagagccctgaggaatsagtgtgagttgagtaaagagaggaggaaggatatcccagaagaaggggcagcacagtagaaggctgggaggtgagcaatggtgtggagt

SEQ ID NO: 1616 - DNA, 179 bp, Homo sapiens
tctttaacgctgatttctgagattttggtgcaccatcacccgagcagtgtacactgtacccagtgtgtagtctcttatcccttaccttcrtctcacctttcctcccaagtccccaaagtccattatgtcattgttatgcctttgcatcctcacagcttagctcctgcttgtaattaaga

SEQ ID NO: 1617 - DNA, 179 bp, Homo sapiens
ttgtactagtttacattcccaccagcagtgtaaaattgtttccttttcattacatccatgccaacatctattattttttggttatggccrttcttgcaggagtaaggtggtatctcattgtggttttaatttgcatttccctgataattaatgatgttgagcatttttttttcctgttc

SEQ ID NO: 1618 - DNA, 179 bp, Homo sapiens
tatccatccatgagcatgggatgtgttcccatttgtttgtgtcatctgtgatttattttagcagtgttttgtagttttccttgtagaaawctttcacctttttggttaggtatattcctaagatttttttgtttttatttttgttttttttttgcagctgttgtaaaagggattgagtt

SEQ ID NO: 1619 - DNA, 179 bp, Homo sapiens
tttttgcagctgttgtaaaagggattgagttcttgatttgttcctcagcttggtttctggtggtgtacagtagtgctgctgatttgtatrcattgtttttgtatcctgaaactttactgaattcatttattagatctaggagctttttggatgagtctttagggtttcctaggcatacg

SEQ ID NO: 1620 - DNA, 179 bp, Homo sapiens
ctaattccttgaggtgtgaccttagattatctatttgtcctctttcatactttttgatgtaggtatttaatgctatgagctttcctcttrgcactgctttagctgtatcccagaggttttgataagttgtgtgactattatcattcagttcaaaaaatttttaaacttccatcttgatt

SEQ ID NO: 1621 - DNA, 179 bp, Homo sapiens
ttcctcttagcactgctttagctgtatcccagaggttttgataagttgtgtgactattatcattcagttcaaaaaatttttaaacttccrtcttgatttcattgttgacccaaagatcattcaagagcagattgtttagttttcatgtatttgtatagttttgagggtttcttttggag

SEQ ID NO: 1622 - DNA, 179 bp, Homo sapiens
gcttgcttttggtttccatttgcatggaatatcttttcccatctctttaccttaagtttatgtggctccttatgtgttaggtgagtctcytgaagacagtagatacttggttggtggattttttttttcctttctgcccttctgtatattttaagtggatcatttagggcatttacact

SEQ ID NO: 1623 - DNA, 179 bp, Homo sapiens
gggggatctaagctcaccctaagttggccagggtaaatattttagtttcttaggtgatgagcagggccataaagcttccgagagtttctrggttttgtgttcagctaccaaggcaggtagggaaataccatcaggtgggggcaggggtaggtgagtctagactcagacccttcttgggt

SEQ ID NO: 1624 - DNA, 179 bp, Homo sapiens
aggtgatgctttcaagagagcactagtgcattagtagaagggggatctaagctcaccctaagttggccagggtaaatattttagtttctyaggtgatgagcagggccataaagcttccgagagtttctgggttttgtgttcagctaccaaggcaggtagggaaataccatcaggtgggg

SEQ ID NO: 1625 - DNA, 179 bp, Homo sapiens
gagtgtcaactgtgccatggagtgtactcagggggttccttcttccaggagggagggatgacctgctctgactgctccaagaaaaaacaygcaaagaatatcaccaaggtgatgagggggaagaaggtaaggagaggaaacaagacacagactgagggaaaaagaagggccacacaaat

SEQ ID NO: 1626 - DNA, 179 bp, Homo sapiens
gaaaagaaaaagagacaataaagagggcagaagaagagttagagaaataaaactgtattggccaggcgctgtggctcacgcctgtaatcscagcactttgggaggccgaggcgggcagattacgaggtcaggagatcgagaccatcctggctaacgcggtgaaaccccgtctctactaa

SEQ ID NO: 1627 - DNA, 179 bp, Homo sapiens
ctttctctcactctgcagtctaaagcattctctgttagttgctcatctatggggttctcacctccccagcaatacaggctcttactttcyctggtccagcaaagtttccatgtcttttttttttttttcagacagagtctcactgtatcccccaggctggagtatagtggtgtgacctc

SEQ ID NO: 1628 - DNA, 179 bp, Homo sapiens
tagctacacaacagaaaggtccagccatttcagcctcagaaaagagtgcttttcccatataaatggggcaggcaccatggagttctacarcacgagatgcgaagtctatagaaagcattcattttcttcccttcccaccaattttacaagtgaggaaattgaagttaagaggggaaaga

SEQ ID NO: 1629 - DNA, 179 bp, Homo sapiens
ataattcaacataaagttgaattatgttcctatgtttagggagcataattcaactcaaagtaaaaatacttttgagaatagtatcatctrctttaatagaaccagtctgatggtttggcacacttaattctttcacatatcattgtaaaaataaacctgtgcccaaactctctgtccac

SEQ ID NO: 1630 - DNA, 179 bp, Homo sapiens
tttaaaaaaagaaaaaaaaggaattgtctttttaatttatttgtaaaccttcagcctgtgttcagctccagactgaagatctgtcttatyttgcatccctaacacttaggaaagtgacttcacttttgtcttaagcaaatgctccagcacaccagggctctgccgatacctactattct

SEQ ID NO: 1631 - DNA, 179 bp, Homo sapiens
agcatgctgttggcgaaggtctggaagttgaacatgtcgtcgatgccagcctcccacctcacatggggaaagctggacataccgaagatrgagtagatgaacatgacaaggaatagcaacagcccgatgttgaagagggcaggcagggacatcatgagggcaaagagcagtgtgcggat

SEQ ID NO: 1632 - DNA, 179 bp, Homo sapiens
gcaggcttgcaaagccagctgagtggctggaaataggagtgcagctggtggccgtgtgtctgtctgggagagcaatcatgagttagaggwagtcttaaaagaggacttacagggtaagggtgtggaatgtctggggccatgttggtgacttggtgtgctactgcctcttttattctacc

SEQ ID NO: 1633 - DNA, 179 bp, Homo sapiens
ttttgaaatatgatttatcttgtcctaagaatgttgtcttccttgaggggaggaagctttctttggcagcctatggggttgggtgatgasagggaagaagctgggatgtcaaagagagattgagtagtatgtgggggaaggtgccaaaaactttcatgtttttgccaagggttgtccct

SEQ ID NO: 1634 - DNA, 179 bp, Homo sapiens
agagattgagtagtatgtgggggaaggtgccaaaaactttcatgtttttgccaagggttgtccctagcacacacctccttggcatctggytcaaatgtggattcaatcttactccagccacaagtaaaggccagtgtggactcagctgcttgcttctcagtaagtcttagggtcctcct

SEQ ID NO: 1635 - DNA, 179 bp, Homo sapiens
ttttctcttgtaaatgtttttcactttgttctgacaaagtttgaagtaaattatgcaaatcctataccttgatttaaaaaaatctaatascttggctaacagaatgcatgtctccataattcatttagggaaaggcttgttcctttgttaaatgtcctttggacttttcccttgtgtgg

SEQ ID NO: 1636 - DNA, 179 bp, Homo sapiens
ctccataattcatttagggaaaggcttgttcctttgttaaatgtcctttggacttttcccttgtgtggggaagggctaatgaaattgtgycatcagcaatacctgtgattttcttcactaatgctgcatcttagccacagaaagtttatgtagaaggacacagggccaattccattcac

SEQ ID NO: 1637 - DNA, 179 bp, Homo sapiens
tcaccaggtcagcacagctatcccgagctgcttgcatggcagcagctgatggctcatacttgcagcattctacaaaaaaagtctcttttrgctgcctgcttctgggataggtatggggagggtaaaaaaaaaaagctggcccccttgcctcaaggtaggactaactgtggtacaggtca

SEQ ID NO: 1638 - DNA, 179 bp, Homo sapiens; identical to SEQ ID NO: 1403

SEQ ID NO: 1639 - DNA, 179 bp, Homo sapiens
tttgaatgtctgatagaattcagctgtgaatccagtctgctcctggactttttttccttggcaatttttgaattactgtttcaatctcgytacttgttattggtctgtttagagtttctattactttctgatttaatctaagacagttgtatatttccaggaatttattcatctcctct

SEQ ID NO: 1640 - DNA, 179 bp, Homo sapiens
actctcacctttagcttcctgacataatttgaaagccacctattttaataacatgtttatgtaagttagtccctgcaaatgctgggaaastgggctgagatctgtggaatttgaaaggagatctgagaagatctgtggacacaaagggcttcctgggaggaccatctttatggggggag

SEQ ID NO: 1641 - DNA, 179 bp, Homo sapiens
ctgagcaggcaggtgggaggctcctggtaggtccaagcaaagggcctagagacaggaagcccctggccggcctggcataactccccctcsccagactccctggaagggtgcagctgggccacgatgcccagctcacaaatgctggccactgtacttaggaaggtcacactgacttccct

SEQ ID NO: 1642 - DNA, 179 bp, Homo sapiens
gcaccactgatgtctgattgttacaaatcccgatattcaggctctgaaaacaaagattcataatattcaaattctgaatggatcactgaratacccaacttgtattcataaaaatggtaatttaaaacatttcattccttatttttaaaactctgtgtaagcccttcccatttgccagc

SEQ ID NO: 1643 - DNA, 179 bp, Homo sapiens
gtgagcctggatacacccataagccccacatggacacccatgcaaatctttttattttattttatttcaatagttttgagggaacaggtkgtttttggttacatgaataagttctttatttgtatttcaatagttttgggaaacaggtggtgttgggttgcacagaaaaattctttaac

SEQ ID NO: 1644 - DNA, 179 bp, Homo sapiens
agtgaagatatgctgacaacttacttattcatagttttgttcaactataaaataaaatgtctgctcgtatacctaacagtcattgacttyaaatgccagtcacattataaggaatgcaatacttctaattaaggaattataccaattgtttttcttgtttcttctccaaccacaatatt

SEQ ID NO: 1645 - DNA, 179 bp, Homo sapiens
ccatcttgatttcattgttgacccaaagatcattcaagagcagattgtttagttttcatgtatttgtatagttttgagggtttcttttgkagttaactccgaggtttattcgactgtgctctgagaggatacctgacataatttctattttcttaaatttattgagatttgttatgtta

SEQ ID NO: 1646 - DNA, 179 bp, Homo sapiens
aaaattaaagttttgtgcatcccaagacattatcaacagagtaaaaaggcaacccacagaatggggaaaaatatgtgcaaatcatatatstgataaagaattaatatccagaatatatagagaacttctaaaagtcaacgacaaagaaaacaaccaaattcaaaggacctgaatagacg

SEQ ID NO: 1647 - DNA, 179 bp, Homo sapiens
acaggtctatctgaggcctccaagcacaggccaactgctccggctgtccacgcggcgccacagaactctgcctggttgatccgcggggcygaggcccatttcttactcccaaagccaggaaggccccaggctggtttgtgactgactgcatttaggtttgccatggtgaaaaaggctgc

SEQ ID NO: 1648 - DNA, 179 bp, Homo sapiens
ctaattgaagtggctagtccagaacagtatccaagaatggacagtctgcaaccttcttcacaaagcttccactcctcacaaacctcctgytccttccggagcatctcgagggcctcctggaacttcttctcctttgcttcaatttcatcagtggttgcctggttctgctcctcatacgc

SEQ ID NO: 1649 - DNA, 179 bp, Homo sapiens
tcccaaggagccaaatccctggagagtcctgagcctcctttgggcactgtgatcctcctatgaagatccagcatggccccactgcccccycttcctgcccacatcatgggtgatggccatgctgctcaacagccattgggaggaaggaagtcccttctctccaggacttaccacctgca

SEQ ID NO: 1650 - DNA, 179 bp, Homo sapiens
ctggattttattctcagagcaatgggaaaccagtgaagttatttgtaacaaatgtaggtactaacataagatgttggtaatagggaaacwctgtgtgtgtgtgtgtgtgtgtgtgtgtgtgtgtgtgtgtgtgtgttgtgggattgatggtatatgaaagctttctgttcaatctgctc

SEQ ID NO: 1651 - DNA, 179 bp, Homo sapiens
tcctctcttcaggcaggctgaggggccgccatggctcagggctggtgaacttcttagccccaaacccccatggctcagccctctcttccratggctggctgggcagggcctgccaggttccaggagcaaggacaagctgcatgccaggccgtgaatggggcttgcacccttgtgtcctt

SEQ ID NO: 1652 - DNA, 179 bp, Homo sapiens
cctctcttcaggcaggctgaggggccgccatggctcagggctggtgaacttcttagccccaaacccccatggctcagccctctcttccgwtggctggctgggcagggcctgccaggttccaggagcaaggacaagctgcatgccaggccgtgaatggggcttgcacccttgtgtccttt

SEQ ID NO: 1653 - DNA, 179 bp, Homo sapiens
ttttgttttctagattctgggcatctgcataaacttcttttcactccaccctcccactccaaatctacatttctcagctccttagaagcygaccctgagattccctccctcctccaagatgtcctctatgatgattcccaccctcaaaagatccttctgtgtgcaggatcccttcttcc

SEQ ID NO: 1654 - DNA, 179 bp, Homo sapiens
ctctaatgtgcagctaagcttgagaagtacatacattttggtaacagacctcttccttccacaggctcatgccaggctttctaaggccaygcgatcaaagcttcatggtttaagatgtgcagagaattgtggccaggcccgggttccagagcaggggctgcctctgtgtgatcttgggc

SEQ ID NO: 1655 - DNA, 179 bp, Homo sapiens
gcattttcatttgtcacgtaggtgtcacatgtgggggaaccactcaagacccatgtttttcgtcatccctctttttgcaggtagtgctcwgatagccctccctgcactctgtcttttttggattactttccttagaacattgctctctgcacgttcacgtccaattattgttaatccag

SEQ ID NO: 1656 - DNA, 179 bp, Homo sapiens
aagagggaggctgaaccagagggggccctagtgctggtggcattgtctgccctagtctgggctgctatgcagaaagagcccaagagacasgcttggtgtgagactgactccccagtgaagtctcatttgtgtttttggccaaatccagtcctgccccgagccttttttttttttttgag

SEQ ID NO: 1657 - DNA, 179 bp, Homo sapiens; identical to SEQ ID NO: 1465

SEQ ID NO: 1658 - DNA, 179 bp, Homo sapiens
gtaaatgaatgaatgagcaaaatgcagtgaagaggccaggcacagtggctcacacctgtaatcccggcactttgggaggccgaggtggcrgatcacctgagctcaggagtttgagaccagaccggccaacatggtgaaaccccgtctctactaaaaatacaaaaaattagtcaggcgtg

SEQ ID NO: 1659 - DNA, 179 bp, Homo sapiens
tttatatctgtgatttaccaaatattgttcaattgctccccaaaatggttgtaccaaatccacactcttacaagctgtgagttcccactsttccacaaccctgtcaacacacagaagtctattttttattctgttagggtaaaaaatagtatttcagtgttgctttaatttccattcct

SEQ ID NO: 1660 - DNA, 179 bp, Homo sapiens
gagttattttagaattaaggttttgacaaatggtgggcaatgtcttctgagtataagcattagaattgctttaaaattcatcctctaacragaccaactggtctgtgattttccacaaaaaccctcctgggtctcttctatatattcctctatttaatttctattggttataaaatggc

SEQ ID NO: 1661 - DNA, 179 bp, Homo sapiens; identical to SEQ ID NO: 1512

SEQ ID NO: 1662 - DNA, 179 bp, Homo sapiens; identical to SEQ ID NO: 1502

SEQ ID NO: 1663 - DNA, 179 bp, Homo sapiens; identical to SEQ ID NO: 1504

SEQ ID NO: 1664 - DNA, 179 bp, Homo sapiens; identical to SEQ ID NO: 1507

SEQ ID NO: 1665 - DNA, 179 bp, Homo sapiens; identical to SEQ ID NO: 1514

SEQ ID NO: 1666 - DNA, 179 bp, Homo sapiens; identical to SEQ ID NO: 1513

SEQ ID NO: 1667 - DNA, 179 bp, Homo sapiens; identical to SEQ ID NO: 1515

SEQ ID NO: 1668 - DNA, 179 bp, Homo sapiens; identical to SEQ ID NO: 1442

SEQ ID NO: 1669 - DNA, 179 bp, Homo sapiens; identical to SEQ ID NO: 1439

SEQ ID NO: 1670 - DNA, 179 bp, Homo sapiens; identical to SEQ ID NO: 1436

SEQ ID NO: 1671 - DNA, 179 bp, Homo sapiens
tattgtttgactaataggaggtctagaaagaaattagaagacaatgagcaaggccttcaaaattaagagggaaataatttctaatacagragtctttccctagccaaactgtcaaagaaggtagaatatatgaagtcttgggaaatgtacttcttagttacccttctaataaagttact

SEQ ID NO: 1672 - DNA, 179 bp, Homo sapiens
caggctctcagctgttttggtggtgagatggcagttatcaggtggagctaggactcaggaaaaaagagacaggagaggctcgtggggaakgcccttcggggaaatgataaaagaattttcagggatcaacagcatcacctggaagctctttggaaatgcagaaacttgcaaggccccag

SEQ ID NO: 1673 - DNA, 179 bp, Homo sapiens
aggtggccatgcctgggtccttgtggacaaaggccagggaccaggcccgaggtcggtgtagatagcagctcagaatggtatcacatgccytacccctagtgccaagtgtcaaaagtgatcatctctccgtagagatagtacgggagaggctacctcttcaccttctgtacatattccac

SEQ ID NO: 1674 - DNA, 179 bp, Homo sapiens
tgctttccaaagaggttgtccaaatttacactcccaccagcagtgtgtgagtttctgttgctccatgtcattcccaatacttggtattgygacactttaaaaaatttcccttctatgatgaacatgtaataaaatctcagtgtgattttaatttgcaactctttgatttaaaaaaaggt

SEQ ID NO: 1675 - DNA, 179 bp, Homo sapiens
gccagcttggtgctcagaggcctggggctgctgctgtagggcacacactacctgaggcccaggtctgccacactttccaggtgagggacsctgggacagggcagagaaaggtgcaatagctggaaaagaggtcaggaaggcacaggcagccttcaggcatttggactaatcatggggtc

SEQ ID NO: 1676 - DNA, 179 bp, Homo sapiens
ccatattgaaaaacagtttggtggtccctcaaaactttagataagtggttttcaggggtgagggagaggggaaatgaatggggattgackattaaatgggtagagtttcctttggggaaaggaatatattctaaaattagatagtggtgatggttgcaaagctctgtgcatatattaaa

SEQ ID NO: 1677 - DNA, 179 bp, Homo sapiens
actgttattgaatccacagtccacgtgtatatttcatcagttgtctcatcatatcttctttctttctatttctttctttctttctttctyttttgagatggagtcttactctgctgcccaggctggagtgcagtggtgtgatcctggctcattgcaacctctgccttctgggttcaagc

SEQ ID NO: 1678 - DNA, 179 bp, Homo sapiens
tccctctctctctccctccctccctccctctctctctccctccctccctcccttcctctttctttctttctttctttctttctttctttytctttcttctttctttctttctctttttctttctctctccctcttgctctctctctttctttcatctgtctttctctcgctttttctat

SEQ ID NO: 1679 - DNA, 179 bp, Homo sapiens
gaagcctacagagatttggctctagctgccaatggtaaaacagcaggcaggctgcaagtcatggctccaggcccattctggaacagaggygaggcagcatcgggtggggtgggaggcccagaggtttaaaaatgacagccacagtgcctccccatggtctaaccccacaggaggaggca

SEQ ID NO: 1680 - DNA, 179 bp, Homo sapiens
tggggttggcaatcaggtggggaggtcactctggtctgggcacccgccctgacggggctctgtgctaggagaggcatttgctggtcaccmcagtgccatcctctcaccatcagctcagaagaggccctgtggaggtgggctggagggcagcgggatgctgttggctcagagagaggcac

SEQ ID NO: 1681 - DNA, 179 bp, Homo sapiens
ttggcaggggagtgtcacggagagacagagcagaagtgagtggggtagggccaagccatttccagctgtgggctcaggaaggcttgaagratagttgataaatgagtgatatctggaaggacaggagaatttccgagagtggaggtggagccctcgtgtggaggaaacagcctgcacaa

SEQ ID NO: 1682 - DNA, 179 bp, Homo sapiens
atccctttttgtctccacagaaatcctgtacagtaggtcaaaggcattctcttaaataagagaaaactaagaaccaatgaaggtctgtgyttactgtgatataaagatgttaattggactgaacaagcttatctctgagtcttttgattccagattcagagctttacaatctctggggc

SEQ ID NO: 1683 - DNA, 179 bp, Homo sapiens
atcctgagttgcctctgataacaaagaatggggttagggaaatccttgcttaactgaatcacctatgaatgatctcagagataatagctrggtaatctgttgttggagcaggaccaaagtaatttacagggcggacgaaagtgcgtgcgctatccatggttctgaaatagctagtgagc

SEQ ID NO: 1684 - DNA, 179 bp, Homo sapiens
ctgggagtcaggtcaacagctccagcctcaccttcccaactcagcccttctctttgtccccacaccagcctcctctctgccttggcctcrcttccaggaactgcccactagattctcccaacagggaatgtccttgctctttcacacctgtcctcatcaggtatcctttgggacagctc

SEQ ID NO: 1685 - DNA, 179 bp, Homo sapiens
atgttaaagaataaaatttcccagtcttgtggaatccttaacttttcctatggaagaaacaagatttagagcctgagcatcatcagaggygagaggaggtgtgtgaggctcctatgtggtcccaggtaagctctgtcatgaaatggcacccatgcactgatggggcagaaatcctgtgt

SEQ ID NO: 1686 - DNA, 179 bp, Homo sapiens
caagaggacaaatattgtatgattccacttatataaggcacttagggtagtcaaatttgtcaaatattatatgattccacttatataagrcatttagggtagttgaatttgtcaaatattgtatgattccacttatataaggcacttagagtagtcaaatttgtagggatgaaaaagca

SEQ ID NO: 1687 - DNA, 179 bp, Homo sapiens
ccagggccagggaagatgatcgccactgaataaagctaaagagacaggaagggacagagacaaaggctgggttatattacatcagggatygtgtttgttcacataatgactttgcaggtatttgcaaggagtgtggagggctgtggcagggaagcatcaagagtggggcacatggtggg

SEQ ID NO: 1688 - DNA, 179 bp, Homo sapiens
ttttccaagatagaaacttaggagtcttcctttatgcttcctcaaatcttcctcccttgtgccagacacttttttacactctggagatayagcagtacacgaactataggtccataacctttgggagcttaaatatagctctgggcctcagtcaactaatctggccagcttcccagacc

SEQ ID NO: 1689 - DNA, 179 bp, Homo sapiens
ggtaatttgggctgacagaaaagttcttgacatggacggtggtgatggtggtaccacagtgtgcatgtgcttactgctacagaattgtaygcttaaaccatggttatgatggtcagtgttatgctctctcagcaagttccccagacttgctcaggagaaggccatctcccaggccctcg

SEQ ID NO: 1690 - DNA, 179 bp, Homo sapiens
ctcggcgaggtaggttaggagcagccagcccagagccggcaggtgagactgaggtggcctgggaggcatgcgcccggtggaggggctccrtgggagagctggaatggggcagccaagcccctgcctgctcaggcttcgccagttgaccctgttacctcagggtgacagttctctatgtt

SEQ ID NO: 1691 - DNA, 179 bp, Homo sapiens
gtaggtggggcaagtgctccaactgtttcttatgggccagaggtgggcaggcgaagagagagccagtgtgcaccactgtgacagggccamctggagggacaaggggtcttgccaggaagggctaggctcatggttcccatgggcaaaggaagacatcataagggggtacccagaagaga

SEQ ID NO: 1692 - DNA, 179 bp, Homo sapiens
tgtgctgtttccaggaccccagccttcccttgcaggaggttctggcaaggcttgtggcaggcacataccaccttctaactctgggcaggscaagggggcttccagaacttctcagagagctttaagatgttggagacacagagaactgggcctccaggatccaagaaagctcaagtgga

SEQ ID NO: 1693 - DNA, 179 bp, Homo sapiens
ggggctgtgtgggctggcattagctccctcctccagcagcctctaattttctcatccccaggcagatctgctgggaaatcgcagggctcygtgtgtgaggggtggctcagcctggccctgggctgagtgcttggcaattctcattctccccagaatagacagtctggtaggccctgggg

SEQ ID NO: 1694 - DNA, 179 bp, Homo sapiens
tgcagagaattgtggccaggcccgggttccagagcaggggctgcctctgtgtgatcttgggccagtttcttcatctctctgagccttgartgtcctcatatataaaatggggataataataactccataggaggtttctaggagttacagctaatggctgtaaagtggatactctctat

SEQ ID NO: 1695 - DNA, 179 bp, Homo sapiens
gctctgcactcctctggcctctgggctcatgggctggtggcagactgctcccagattggcctgtcctgtcctggcctggataaggcacaygggagaagagagcagacaggtttggggaaaggctctggaatctatagcccatagtacttgccccacagcagcctgaaaaagtgaatgta

SEQ ID NO: 1696 - DNA, 179 bp, Homo sapiens
ccaacgaggaggatttaagtgcctggtgaagtccactctctgtgtccacaagtcacagagacagtttaaaatgaaataactggagttcartgaaagccacttaaatagctttcttagttatgtaaatgtagggtgaagaatgagtggccttggtcccccacctggagttagtttattgt

SEQ ID NO: 1697 - DNA, 179 bp, Homo sapiens
aataaatatccttttacgtgcttgttttaaaacaacttgtctaattcttttcttaggaaagatttctggagatgaaattgtgtagtcaawgaacgtttttagagattctgacacatagtgctaaatgatcctaggagaaaggttttaaccaagtccacaagctgcatgtgagtaactgc

SEQ ID NO: 1698 - DNA, 179 bp, Homo sapiens
taaaaggctctcttctgtgttcagatctgaagactattttgattagcaggctgcatccatactgctccgggcagtcccactgtatgtgtytgtggggaagggtgtgcctgtcctcctgtgtgcattcctgtctatgggttccattctcagcctctgcatagcttaggaggcatcagagc

SEQ ID NO: 1699 - DNA, 179 bp, Homo sapiens
ctggagtggtgaacagatagattggtgtgttcattggtgggtgggtgattgataagtggatgatcaatagatagatggctgtatgagcayataggtgcaagaataaatgggtacattgaatagatggtttgttgataagtacatagatggatgggtaagtgagtgcatggggggggtag

SEQ ID NO: 1700 - DNA, 179 bp, Homo sapiens
attgtttatattttgcacatttattttatcattctctctttcctcatatatatgtgtgtgcttatgatgtactctgtattcgtatctacyatatatagtatatatacacatacgcacatgcacacacatatttttttcagagtcacgtgagaataagttgaatacatcatgcctttttt

SEQ ID NO: 1701 - DNA, 179 bp, Homo sapiens
ggatatatactttaagtataggataataaaatgattacctgtgcacccaccaccaaactctaatgaatattaacattatgccatatttgyttcaaatcttgctttctttttccttaccaaaaaaaaaaaaatagcaaatacttaaatagcatttgatgtatgccaggcactgttctagt

SEQ ID NO: 1702 - DNA, 179 bp, Homo sapiens
tgcaaacctgtatttaaaacataataccttatgaacatccttccatgccaattaaacacaatctacagcatcactctttttctttctttyttttttttacatttgtggcacattccactgtacagatgtgctataactggtttagccatttccctgtgatagtcattcctttttcccta

SEQ ID NO: 1703 - DNA, 179 bp, Homo sapiens
ctctaggttatgttggatattttatgtatacaatcttattatctgtaaattacatcttcggtacttttttcttcttgcactttttttttytttgctttactatgctggctgagacctcctttacaaagtggaactgagaagaacagacatctttggtttttttttcttttgatctcaaa

SEQ ID NO: 1704 - DNA, 179 bp, Homo sapiens
tgtcttgtctgctgaaagactaaagtgtaagatcctggagatagtgagtatttattctgtgcttctgtttcttacaaagcacttcataaracaatcctgtattcaatagttagatgtatagcaaatggaagaaaaataggatcattgggatggctagaaggaaagaaagaaagaagtac

SEQ ID NO: 1705 - DNA, 179 bp, Homo sapiens
catgtctctgtgtctccaagatactaattgcccccagcagtgctcaacacattcacccttataatacatttatttccatgtgtgtcttgyctgctgaaagactaaagtgtaagatcctggagatagtgagtatttattctgtgcttctgtttcttacaaagcacttcataagacaatcc

SEQ ID NO: 1706 - DNA, 179 bp, Homo sapiens
tgggatggctagaaggaaagaaagaaagaagtacagctggatgaaaagttgaagggtgattgcatagagggatgaattaaaggatacaakgataaataggatagatttaatgtataacatgaatactatagttaataatagcatattgttttcagtatttttgctcgctgagtaattat

SEQ ID NO: 1707 - DNA, 179 bp, Homo sapiens
atgactgacttgtgagccccttttggtctgtcagttttctttaagtggtggtccaaagactgcaaaggacagaaacttacatgaaaaaarttcccctgctaggaactttgaaggtgccagggagatgtcatagatacgggctatgaccctgtcctgtgagatcttagccacaccacaga

SEQ ID NO: 1708 - DNA, 179 bp, Homo sapiens
gagatataatgactgacttgtgagccccttttggtctgtcagttttctttaagtggtggtccaaagactgcaaaggacagaaacttacaygaaaaaagttcccctgctaggaactttgaaggtgccagggagatgtcatagatacgggctatgaccctgtcctgtgagatcttagccac

SEQ ID NO: 1709 - DNA, 179 bp, Homo sapiens
gtttgactgtcattatcaccaacattatatatcattacaatagacctaatgagacataatttattaccatttaggaaatgatgtgaagtygaagactgaacatgtggctatgccgtgtctattttgtacaggttctgtgttttaactcaccacctgataatcccatggcaggcccatcc

SEQ ID NO: 1710 - DNA, 179 bp, Homo sapiens
tggtggaatgtagacactcaagagtaactgcatgacaaatgtataagtaattgtattaacacttgaatgaacagaggactgaatgaacargtagatgaaggcaagaaatgagtgattgactggatgatgaaagaaagaaagacaggatgaatgtgtttgactgtcattatcaccaacat

SEQ ID NO: 1711 - DNA, 179 bp, Homo sapiens
gggggaacaggccccattgcagggagcagtggtgtgaacaggctgccttgtactacaggccttggctggacccaggcagaggtgagtgaracttgaacacccagactcagggaagagccagggcacacagccctctggatcccaccagtcaggacctgggtcccatggtgggcaatgac

SEQ ID NO: 1712 - DNA, 179 bp, Homo sapiens
ccatccttttcctactgattgttttattttattttattttattttttgagatagggtctcactctattgcccagtctggagtatagtggygtgatcttggctcactgcaacctccacctcccaggttcaagcaattctcctgcttcagcctcctgagtagccagaactacaggtgcatg

SEQ ID NO: 1713 - DNA, 179 bp, Homo sapiens
tttagctttataagatatcttaacatactatggtaaattctctaccttagtccttaatttatcttgatctactttacttttccatatgartcttaggattatcttgtcaagttccattaaaaaaaagtattgagattttgactggaattacattgaacttataggttaatttgggaaga

SEQ ID NO: 1714 - DNA, 179 bp, Homo sapiens
gacctggggcactcggaatggaccctcactcttatgggcatgtccttgaactcctaccaacccataccatggggtctcgtcccccagccycggctccagtgccgggatactggcctcaggttggggatatcacaacacccaaaactaccctgtccctctgcccagagctcccctactct

SEQ ID NO: 1715 - DNA, 179 bp, Homo sapiens
cttctcagagcattgagggcttttttggccacacaggaaccaggtgggttgggccgggggtatttggaagaggggatgtggggttagagrtaatcctgtatcttctgggatgtctactcccctcaaatctatgtctctggagctgggagcctgaaacttaactgggcttggagttagag

SEQ ID NO: 1716 - DNA, 179 bp, Homo sapiens
ttgagcagagtctggtcctgtcacccaggctggagtgcagtgatacgatcttggctcactgcaatctcggtcccgctggggatccaagtratcctgccacctcagcctcccaagtagctaggaccacaggtgcacaccaccacacccggctatttttgtgtatttttagtagagacagg

SEQ ID NO: 1717 - DNA, 179 bp, Homo sapiens
agaatgatatttagaaaccaagatttgggtgctgtaggtgctcattcatatggtgtgttattgcttccagttggtcctttttattatccrttcatttggatacaatggtgagggcgccactgaagaaagtgtggcttagggatggaaagggggaaaggagccagatgacctaggtagag

SEQ ID NO: 1718 - DNA, 179 bp, Homo sapiens
gtctcaggcaggacctaaacatttgacaagcagcatctcatttaagcttcaaaataatcctaccaagtaggcattaccattcagtttcayagatgaataaatggcggctcagagaggtttgggaactgatcttaggtcccacagcttgtggagtctcactctttctttctatacctaga

SEQ ID NO: 1719 - DNA, 179 bp, Homo sapiens
cccctccacccaggatggcagaccagtccctgccccgaaactctcttctcccttggctttgcgtcattgccaccctagttttcctcccayctctcagatcctgcctcgtcccgcacctgtgctcctccctaaagctgaggccatgcaccgagcagttttgtcacccttcctggacaatc

SEQ ID NO: 1720 - DNA, 179 bp, Homo sapiens
tgtcctgggagttgagagatgaccaactctgcccctgccatgtcatccctcctgtctctgggcctcagtttccctatctgtataataaasaggcaggacttgatttggtatcaagaaaaaaaaaatcagaattagaatccagacattctgacttccaggagcagtctaacaacaacaac

SEQ ID NO: 1721 - DNA, 179 bp, Homo sapiens
attctgctaggaaacccacttgtcatgcccttggaaaaaaattctttcctggaatatgggtgaagaggggtcccttccagggagtccctyaatccagaccaacaggtgttcctctccatcatcagtcttgcccactctgatgtttttcctagccatatccttcttacagatgacaccag

SEQ ID NO: 1722 - DNA, 179 bp, Homo sapiens
actcagaagactgagagacattgggcagctgaagatggatttagaccttcttcccttaacctcattcagggtgggttgcagtgagaagayggatgagtttacaagcatactgcactcatttagaagtgtgagtgtgtgtattatacttgcacatacagacttctagaaccttgacttat

SEQ ID NO: 1723 - DNA, 179 bp, Homo sapiens
gcgccctctgttcttttcaatgccactggggaggaggcagcagtataagctcagtggttctaagccatggctgcaccttggaaatgcctrggagcatttataaaatacaggtgcctgggcaccacccaagaccaataagatcagaatctctggggtagtggtggtcggtcactgcatat

SEQ ID NO: 1724 - DNA, 179 bp, Homo sapiens
ggacattcatgatggatgggatggcgcccaccagggcatccaccaccacctggtgggagatagagaaagacctggaacctcccaatgccycaccccctctgctggattctatctctttctatactcattcaggctgcttcatgagccagtggcctttggaagaagcaagagaagtgggt

SEQ ID NO: 1725 - DNA, 179 bp, Homo sapiens
ctcccctgagatgaaggtgggagcaggaagcctagttcatgtccttggcatcctatctaagcaggcttagtggcttttagttagtttgaytgagagactcaacagtccttagatcaggtcagcactggacacaacctcctacctaatctccctgcacctaagctcagcttttatgtaat

SEQ ID NO: 1726 - DNA, 179 bp, Homo sapiens
catcaccaacctctggtacgtaggtggccaagcttccagtgtattaaatcaactcttccttttccttctaggggcagcagtcaggcctcracaaccttgaaactgattttcagagacttggagacatgatgttccctcctaggggctatgctgagagtctattctgaggaatatagtaa

SEQ ID NO: 1727 - DNA, 179 bp, Homo sapiens
acacagtcaattctctaatgcagggattactggccacaggttaccatgagtgtgaacacatgaactccagctcattacctctccaaatgygccctctgttcttttcaatgccactggggaggaggcagcagtataagctcagtggttctaagccatggctgcaccttggaaatgcctgg

SEQ ID NO: 1728 - DNA, 179 bp, Homo sapiens
tttccccagatcacacagaaagcctgtgtcagagcagtggaagtttatcacacacagggaggcttgctccttccaatgatgatgtaagcrtataagcattgttgagagctctttaaaacagtggcagacatttcaccaaagaagatagaggaatagccaataagcacatggaaagatgc

SEQ ID NO: 1729 - DNA, 179 bp, Homo sapiens
agcctggccaacatggtgaaaccccatctctactaaaaaatatacaaaaaattagctgggcatcatggcgggcacctgtaatcccagctrcttcagaggctgaggcaggagaatcacttgaacccgggaggcagaggtttcagtgagccaaggccatgccattgcactccagcctgggc

SEQ ID NO: 1730 - DNA, 179 bp, Homo sapiens
gtttctgtgcaacactaacctctgacccacagatacttgtcaacctaaatagcagagagagactctctaaaagaaaatgatggacactgmaatgggaatacatgtgccattgtaaactgtgtgcatattcagggaggtaaaggaagacaaaggtttttaaaggaaaagtgaggaggatt

SEQ ID NO: 1731 - DNA, 179 bp, Homo sapiens
agataaattgaaaaaacatgtgataattcattgatagtgtatgacagtaaaataatgggtagatgaacagataagtaaatgaatgaaaamagaatgagtaaataatgaataaataggtaagtaagtgggtaaatgaatgaatgagcaaaatgcagtgaagaggccaggcacagtggctc

SEQ ID NO: 1732 - DNA, 179 bp, Homo sapiens
cttacatatggctggtggggggctgtgtcttttgtggaggcagttaggctggatttaccaagaaaattttaaattggccctcaagtcctygtctagtaatctaacttcataaataattacacatgtgcatcaaaaatacacataaatgatgttcattgcagcagtgttcctaataccat

SEQ ID NO: 1733 - DNA, 179 bp, Homo sapiens
acacacacacacacacacacacacacacacacacgagggacttagcaagtggatggatgcatccaagggacctctgtgtcttgctaatgycccaagaccctccagacaatctctttggtgacaggaaggaggcaacaaacttggtacttctcctttgaggtggccctctgtgaccccct

SEQ ID NO: 1734 - DNA, 179 bp, Homo sapiens
taaagacagtgcggatgcaagagcacctggccaagcgagagcagctgggtaagcgccaccagggtggggcttcggggcccaggccacggmcagagccacagccttctgtggatgtgggctggcagctgccagggagcgggaccaggaccagagactgctctcagatggccaaggcgctc

SEQ ID NO: 1735 - DNA, 179 bp, Homo sapiens
tgacctctaagacttggaagaggaagcaggggagctagggctgatccctgggggaagagcattccaggtgggagggaacagccagtgctycagtgccaggccaggacatgcttggcctgctcaggaacctgtaaggagtcggtgttgctgaagtggagcaagaggccggccgtagcggg

SEQ ID NO: 1736 - DNA, 179 bp, Homo sapiens
gtacaggtcatgccccagagttccccatgggatcaagctgaagctggtctctagctgagaacactccttgtttagttccaccctctgccycattctgttttgcttcattcgctttctcctgagagcactccctcaataggtcacttgcacaagaatcctcacttagcttcttctttgag

SEQ ID NO: 1737 - DNA, 179 bp, Homo sapiens
tggggccaaaggggacatctccaaggagctacgggacacggtatccacacccctgatggtgagggcctggaaaagagtggaggaacggaygtttccatcattgagactttgtgcagcctcaggctcaggcaggccaggcaactctcagtgacttggttttccctatcagtaagtggact

SEQ ID NO: 1738 - DNA, 179 bp, Homo sapiens
cttccttgaaaaccagtcttctgatgttcctgtcagagagagggtgctgttgccccacccatggtggcttttcttttacatcacctgacrcactttgatccctgtcagaattgtacagtggactttgagctaaagaaactgatggaaaaatctttccacagagggtcaagaaagctagg

SEQ ID NO: 1739 - DNA, 179 bp, Homo sapiens
aaaccatcatttgtgtcctcaggtggtctatagtatgtacaaaatctaaacattgacttcataccaaactctgatcataccgatttattycactcaccttccttaactcctttttattactaagctactaaagtggagaatcttgccaattggggttctccttactaatccccttatct

SEQ ID NO: 1740 - DNA, 179 bp, Homo sapiens
gggcctaagacataagaatgaggagtattaggaattccagtacacagagatggacgctttgacacgagttagagacattgcttctgctgytcacatgggaattcatcatgacacagtggatgaacaatgcagtgagcagcacttaccctcaaggacggaggttatgatactgacaacac

SEQ ID NO: 1741 - DNA, 179 bp, Homo sapiens
ccactgtctctgttcctggggagggagacctgtacaaaatgtgttatccttaccctctggttctggccaggtttggttaatgggagacayaggcaggacattcaaggatagaaggagagacaagtcaggtattttcccctggcttcttctctcctgtgctatggctgagtagcagagct

SEQ ID NO: 1742 - DNA, 179 bp, Homo sapiens
aatgccacacacacaacaggggctcaacaaatgcttgttgataagagaataaatgaaagaagagagaaggaggaagcttaacagttttcragaataaatgaaaaaaacaaactgtttgtattcaatgtttgctgtttgatgactaatagcaaaacaaaaaccaaaacaaacaaacaaaa

SEQ ID NO: 1743 - DNA, 179 bp, Homo sapiens
agtttttctcatacctgtccaacaagaaagcaggcctatcactgaggcagtgatgttgagtggggacagagaagcactgataagaaatawggggtcaaatggaatataatttgcatcactactgcagaataaaccaggaaacctgtttgacctcaggccaactcaatctctctctctct

SEQ ID NO: 1744 - DNA, 179 bp, Homo sapiens
atgttccagtgcctgggctcctgggtgtcaggtggtccccacacctctcgacttgctgcagctgctcctgctagtgagagagggtcccarctgggtgcctggccccacccttagatgaccagttctaaatttgaagggatcttgcacatcacaggctgccagagccaagagtttcatat

SEQ ID NO: 1745 - DNA, 179 bp, Homo sapiens
ttgaactatgtacttacacagctaaaagcaaatttcaggtagtatatacatgcagaagtataagtttgtatgtacctgtgtagaaagaaygcaatgcaagggaaaatcatttggggcatgttatatttgagatgggtagttctattttaagcacaatttcagtaacatcctcaagtata

SEQ ID NO: 1746 - DNA, 179 bp, Homo sapiens
ctactccctagtgccatcttactatctccttttcctcacaggcaaacttcttgaaaaaattgtctgtacaccatatctccatttcttcayctctcacccgctctttaagccccttcaatatgacctctgcctacccttttactccattaatcctcttttgcttagatcaccaaagacat

SEQ ID NO: 1747 - DNA, 179 bp, Homo sapiens
gcctataatcccagcatgcctgggaggctgaggcaggcagatcacttgagctcaggatttcgagaccagcctgcgcaacatggtaaaacyctgtctctaccagaaatacaaaaaaattatttggtatgttggtacatgtctgtagtcccagctacttgggagactgaggtgggaggatt

SEQ ID NO: 1748 - DNA, 179 bp, Homo sapiens
caggatcaggttcaccaggtagaaggaccccaggaagatgacaagcatgaagaagatcatgtagatcttccctgcggacctgagggtctkggggagcaagggggcagaggtcaccctcactggggccccttctgggttatggcatttccaagtcacctagtctagttgtgccaggggtt

SEQ ID NO: 1749 - DNA, 179 bp, Homo sapiens
ttccccctcctgtagaattactattttctctttctaagtaataagtaattgtggggagatagtttgagactatattcctcatcaaacttmtacccactagtttttgcccactaataattttttacaccatcattacttctaaacttactagttggcccattcatactggctcctgtgtc

SEQ ID NO: 1750 - DNA, 179 bp, Homo sapiens
gtgatctagtaaaaagaacctaatggcataaggattagaaaagaagaaattaggctgggcgtgggtggctcatgcctgtaatcccagcaytttaggaggccaaggcaggcagatcatgaggtcaggagatcgagaccatcctggctaacacggtgaaaccccgtctctactaaaaatac

SEQ ID NO: 1751 - DNA, 179 bp, Homo sapiens
ggctatgatacgagtgagaaataaacctttattggggtcagttactcagttttagagattgtctgtataataggtagctttatttttcaytgattaataaaaatttttataaacaagataaaattaaaatacttatcattacaataaattgggaaaggatatctggaatgaaaagttgt

SEQ ID NO: 1752 - DNA, 179 bp, Homo sapiens
aagctggaccccaaagccagacagttctggtgaatccagtaggtcacctccagcttggtggaccctgctgcggacatgaaggcaggatgytgaccctttctagcttctgcctatcatgtgtgcgtgtgtttgaacacacacacacacacacacacacacacacacacgcaagtcttgtg

SEQ ID NO: 1753 - DNA, 179 bp, Homo sapiens
catgctttcccgctgacacaggagccagcatccgtcactcacagggccacccgctgcctggaccccagcctcaccccagagtgacccagygacagctgcagccttgctgcaagcacaggcctcctctccctgcctcagccacttcccaggctcactcactccttccaggtgaacccacc

SEQ ID NO: 1754 - DNA, 179 bp, Homo sapiens
ctacaggcgcccgccaccgtgcccggctaattttttgtatttttagtagagacggggtttcaccgtgttagccaagatggtctcgatctyctgaccttgtgatccgcctgcctcggcctcccaaagtgctgggattacaggcgtgagccaccgcgcccagcctcgtattttattagaaa

SEQ ID NO: 1755 - DNA, 179 bp, Homo sapiens
atgcagggctcccagttaatactgagagattcctgagagcaggcggcctgcgctaacaagccgtgacatttcttcaggcctctttcctaytcccaagagtcagtgagatgccaagcttcctccagatggcctggagacctagtgacccgacactcctgggaatctgacaggtttggctg

SEQ ID NO: 1756 - DNA, 179 bp, Homo sapiens
tggggctctggagtcagacaacctggatttgagatccaggtctgtggcttattcgcttgcttggcagatgggagactttcgggtcatcayggaaccattctttttcctcacccacccctgaggatcttaaaaacgactatctctcagggttgttgtgagcataaaatgaggtgcgtttt

SEQ ID NO: 1757 - DNA, 179 bp, Homo sapiens
atgttgttgtgacactgaaataacattcataaagcacctgactcattgcaggcaccaagcacatgactttcttgctttaaaaaagtggcrctttcctctgacactgtgggaaaggccttttctctctcttgcttccacttttctaactgtagaatgagggtgtgggctcaaatgtctat

SEQ ID NO: 1758 - DNA, 179 bp, Homo sapiens
cagcctaggtgctgccaaaacatgaggcatgctgattccaccatgttccagaacctactgctgcccctttcacagccctggattatggcrgagggagtggtttctagggacaagtagtcacatttcctctgggccttccccctccacctaagtctgcagcctataagaagctggacccc

SEQ ID NO: 1759 - DNA, 179 bp, Homo sapiens
aaggttggagcagttgttgtccctctgagtcagatactttatccagtatatagtgaaatccagtatggattgtatcttgttaagagtaartaatactaacaagtgatggaggaaaatttaaagcagcatgatgtctaaactagatgccaaagaaaagttccgacttcctgatgcttttg

SEQ ID NO: 1760 - DNA, 179 bp, Homo sapiens
aattgcttcaaagagaataaaatacctaggaatgcaacttacaagggatgtgaaggacctcttcaaggagaactacaaaccactgctcartgaaataaaagaggatacaaacaaatggaagaatactccatgctcatgggtaggaagaatcaatatcttgaaaatggccatactgccca

SEQ ID NO: 1761 - DNA, 179 bp, Homo sapiens
gggcctctgggagcttggagccctccagagctccccctggcagtgttggcagcaatgtggttctcagccttggagctggagagtgggagyttcaccaccagctcaggctctgccttgggctgggggaatgggcaggacctgctgaagaagctgcaaagagcctgtttggtacgatggcc

SEQ ID NO: 1762 - DNA, 179 bp, Homo sapiens
tgatgaaggttgcattctccataccctaaggcaaaaaaaggctggattagaacagacctcctgctcaaggttagagggatgcaatcacgmtctatggcaaagtgtgtggataggtggccatgaccattgccactctcttcctctaccctttggcttggaacttagatacattgctgggg

SEQ ID NO: 1763 - DNA, 179 bp, Homo sapiens
tcttacagttctggaggctgggaagtccaaggtttagggaatacatctggtaagggccttcttgctgttgggaactctgcagtctcccargggggcacaggtgagggaaccgagcaagctagcttgtctttcttcctcttgttataaagtcaccagtcccattctcataactcattaac

SEQ ID NO: 1764 - DNA, 179 bp, Homo sapiens
actatgtgcatgtatacatgcatctcttatccagcatgcactatgctcacagggaccatctttacccaggagctaccacccagcaggcaycatttttacccagctggcgccaccttcacctggaggacatgacgaccatagggaacaagtttactcagcacaagccacactcataggac

SEQ ID NO: 1765 - DNA, 179 bp, Homo sapiens
gtatctgcctccttctggctcttcaacattgcattcaatctaaagagctccccctaccttcccataattgttattttagtttaaataagraagagctggtttctgttgtttgcaacccaagaaccctaaatccaatatggcaccttagtggtgaggacaagggggtagatggtaaaagg

SEQ ID NO: 1766 - DNA, 179 bp, Homo sapiens
gtatattcctgcagtggttcttggagcaaacgttcatggtgtgagtctccacactctgtccaagtgggacctgcatgttagccctgtctyctacccaccattttgtcccctctcctatcacacatgcagatctgcatagagatatactcacgccagggtaatgacgctaaaatccagcc

SEQ ID NO: 1767 - DNA, 179 bp, Homo sapiens
gagcttcttgtatttggatatctatatttctaacaaggccagggaagttttcctcaattattccctcaaataagttttccaaacttttaratttctattcttccttgggaacacccattattcttaggtttggttgtttcacatgattccaaatttattggccgatttgtcattttttt

SEQ ID NO: 1768 - DNA, 179 bp, Homo sapiens
attgaatccaacacatatccaaaagataacacaccatgatcaagggggtttcataccagggaggtagggatgatttaacatacacaagtyaataaatgctgcacgtcacataaacagaattaaaaacaaaaatcatatgatcatctcaataggtgcaggaaaagcatttgacaaaatcc

SEQ ID NO: 1769 - DNA, 179 bp, Homo sapiens
ttagacctacggaaacagtgaagatactgggactgctttctcccttcctccccatttccaagtttaatcctttagtttaaggtataaatmaaaattcaactgaggggtcttgcctgaatcccacaaccagaacagaaagtgaagacatgcccctcctgttacgtattgattgtgaggcc

SEQ ID NO: 1770 - DNA, 179 bp, Homo sapiens
ttgcactccagcctgggcaacaagagtgaaaatccatctcaaaaaaaaaaaaaaaagaattcagaaggctgattattaagtgattcaagragacaccagagaaagataaaaaccaacttaaagaaatttttaaaacaacaagatatggatggaaaattctccagagaaatagatataaa

SEQ ID NO: 1771 - DNA, 179 bp, Homo sapiens; identical to SEQ ID NO: 1370

SEQ ID NO: 1772 - DNA, 179 bp, Homo sapiens
gaattcccatgtgttgtgggaggggagggaccctgtgggaggtaagtgaatcatgggagcaggtctttcccatgctgttctcatgatagygaataagtttcatgagatgtgacggtattataagggggagtttccctgcccaacctctctctttgcctgctgccatccacataagacgt

SEQ ID NO: 1773 - DNA, 179 bp, Homo sapiens
gtgcagccaggtgtgaggaccacagaaccgcaggtgggaagattctctgtgctcacagttcatggctccccaaggtccagaagacccatstatggatgcagggccataagacctctgagagctgcatgtgtcatctcactttggatgtaaaaatgcagaggattgcagggatctttctg

SEQ ID NO: 1774 - DNA, 179 bp, Homo sapiens
ttgatgatctgagaggtaaagagttatttaaacaaaaatagttgttaggctgggcacagtggctcacgcctgtaatcccaacactttggsaggctgaggtgggtggatcacttgaggtcaggagttcgagaccagcctggccaacatggtgaaaccccgcctctactaaaaatacaaaa

SEQ ID NO: 1775 - DNA, 179 bp, Homo sapiens
gtctttcaatggattaccacagaaaaaagttgctcacctctagaagatgctagagcaggtacagtggaaagagcatggacttggagggcrgacaaaggcatggacttcgtgttgaactgcaggtttgagccaaggaatggtgaggtgtgtttggatgggctgctttcctgcttctggca

SEQ ID NO: 1776 - DNA, 179 bp, Homo sapiens
ggctcacacctgtaatcctagcactttgggaggctgaggctgatggatcacctgaagtcaggagttcaagaccttggccaacatgacaaraccccatctctacaaaaaacacaaaaattagctgggcatggtggtgggcgcctataatcccagctactcaggaggctgaggcagaagaa

SEQ ID NO: 1777 - DNA, 179 bp, Homo sapiens
aaaaaaggagactctagatagactccgggaaagaccaggagagaggagagattacagcgtgctgatgctcagcaaataggttatcatggycaggaacatgtcagaggaaaccttgtcacctggatagttcagttgattgccaacctttggccacagggctagacaaagctgtcctaagt

SEQ ID NO: 1778 - DNA, 179 bp, Homo sapiens
cattgcagcctcaacctcctgggctcaagcaatcctcccacctcagcctcctgagtagctgggactagagttacacaccaccacgcctasctaattttttttgtggagagggggtcgggttttagatacggggtttcaccacgttgcccagctggtctcaaacatgcctgcctcccaag

SEQ ID NO: 1779 - DNA, 179 bp, Homo sapiens
tcttaaaacaatttttgtggtttcattgttttacattacaattttaaaaattaaatatagtttggtaaggagtaaatatccattttaatrctttttttcagaatgtagctcatcaaatgccccaacactttattaaataatccacttaaaatccactgattaaaagtcaactttatcat

SEQ ID NO: 1780 - DNA, 179 bp, Homo sapiens
atcagtagttgccaatagcctactgtgtatttatcacaattaggtgctgtggaagatgatgtggtgtagtgggaaaagcaatgggttagyggttagtagacttgagtcccagacacaggtctgtaataaaccccatgttcagtctttgggcatcttctcttctggatcttagttttctc

SEQ ID NO: 1781 - DNA, 179 bp, Homo sapiens; identical to SEQ ID NO: 1417

SEQ ID NO: 1782 - DNA, 179 bp, Homo sapiens
actttaagttctggggtacatgtgcagaacgtgccggtttgttacataggtgtacccgtgccatggtggtttgctgcacccttcaacccrtcatttacattaggtatttctcctaatgctatccctcccctagccccccacccctcaacaggccccagtgtgttcccctccctgtgtcc

SEQ ID NO: 1783 - DNA, 179 bp, Homo sapiens
taggagttgggacaataggcttccaggtcacactgtctcttactagtgaagaggccttgggtttatgtttcctatactccaggcctcagytcctttgtcttgtaagtggggacaatagtctttgccctggaaccttacagggttcttgtgaaaattagagaagggagttaggctgtgaa

SEQ ID NO: 1784 - DNA, 179 bp, Homo sapiens
aagaaatttttactcttggctctgcattgtattcttctagatcttttcctatttctgtaccttccttttcagtctcctctgctgggtccrtctcttctgcttaactattaaacatttagtttgttagaactgtgtctgaggccttcttctcttcttacttcaacccttctgtgttaact

SEQ ID NO: 1785 - DNA, 179 bp, Homo sapiens
atgagccaggctggagtacaggacctcgagagccttgtcaggttgcctccaggtgtgtataaagaactcccacatgcctgcccaattccygggctgttgatatttcactgtgtttgctccattgcccactctctaggctttttctggatatttggagagcaagtcgcagacatgataat

SEQ ID NO: 1786 - DNA, 179 bp, Homo sapiens
atgaataaataggtaagtaagtgggtaaatgaatgaatgagcaaaatgcagtgaagaggccaggcacagtggctcacacctgtaatcccrgcactttgggaggccgaggtggcggatcacctgagctcaggagtttgagaccagaccggccaacatggtgaaaccccgtctctactaaa

SEQ ID NO: 1787 - DNA, 179 bp, Homo sapiens
agagcagactctcagtctaaaggaggggcccctgctcagatttgctaattgttgccagatgggaatgctgtcccattggccaaacttcaraaagaaaatgctgcatttatgtgaaatcaacttttggcagttaaatcacattccaagacacagtgaggcaccaaatgggctagccaagg

SEQ ID NO: 1788 - DNA, 179 bp, Homo sapiens
atccgcctgcctcggcctcccaaagtgctgggattacagatgtgagccaccgcgcctggcctagaaattatttttttaaaaactaaatartgctgatttttaaaacctcaagtataccaaaaggaaaacctaggccagtttttatgcttcatactccatacttctgaatactgatgcaa

SEQ ID NO: 1789 - DNA, 179 bp, Homo sapiens
gacttcagggcctctgtgagcgacagtgacccaagagaccagcgctgttggcactactgaggcatacatatggcccactgaggcactgtrgatggcacaacaggataattcaggtcccaaaatggattttgggagttgttcaagataaaaaaaaagtaggtgtattgtatttttttctg

SEQ ID NO: 1790 - DNA, 179 bp, Homo sapiens
cggggtttcaccgtgttagccaggatgatcttgatctcctgacctcgtgatctgcccacctcggcctccaaaagtgctgggattacaggygtgagtcatcgcacccggcgacacttttgatctttatgggaacataacatttagcttcctaaaacttcagtgaagtagtgctgagggcc

SEQ ID NO: 1791 - DNA, 179 bp, Homo sapiens
cgtgttcttggctcactgcaacctctgcctcccaggctcaaatgatctcccacctcagcctcccaagtagctaggactataagtgcacaycaccacgcccagctaattatttttgtattttttgtagagacagggttttgccatgtcgcccaggctggtcttgaacttctggactcagg

SEQ ID NO: 1792 - DNA, 179 bp, Homo sapiens
agagtttgggctacaggtgtttgttagctatcaacacctgtgaggggaggggaatgaaagaaggagtgagccacggaagaagctgaactrtgatgggggcccaacaagccttgacaaatgcagcatgttgctctgaagagagtattgcctgtcaaagtttctctctttgggtcaaaatg

SEQ ID NO: 1793 - DNA, 179 bp, Homo sapiens
tgcacctaaaggtaatgcttctgtgctctcaaggcctctgataccatttgggggaagttcagtagggccacgttggccacctctgctgcyatttccttgctcagaggtttttttcaccttttctttaatttcgatggtgactgttgggaaagtcaaatctgagcatctgagcatgccaa

SEQ ID NO: 1794 - DNA, 179 bp, Homo sapiens
aactcttctaggtaaatttaagcggttttcctaaacacagtcatgctctgcatgataacatttctgtcgataacagaccacatagaagayggtgtgccataagattataaggagctaaaaaattcctgttgcctagtgatgtcatagccaacaaaaagtggtagcacaagtcattactc

SEQ ID NO: 1795 - DNA, 179 bp, Homo sapiens
aaataacctttttttctttgccccatatgatctgcagtaataaaaatgtatattaatgaattagaaaataaatagtaaaattgatataawattccaaagctgattccttgaaaatttaaggcaaccaaattgataaccactagctaatctaatttctcacatccccaaaaacagatctt

SEQ ID NO: 1796 - DNA, 179 bp, Homo sapiens
tgggtgtctaaagacaggattttagacctacggaaacagtgaagatactgggactgctttctcccttcctccccatttccaagtttaatyctttagtttaaggtataaataaaaattcaactgaggggtcttgcctgaatcccacaaccagaacagaaagtgaagacatgcccctcctg

SEQ ID NO: 1797 - DNA, 179 bp, Homo sapiens
gacatatagaagacaaacaggaaaatatgagaagtaaataaactgaattaacaacagcattaaatatgaatggtttaaccaatccaatcwgaaggcagagattgccagaatagataagaaaacaagatccaattatacactgtctgcagaggacacattttgggttcaaagatataaat

SEQ ID NO: 1798 - DNA, 179 bp, Homo sapiens
aagccacttcacttggtctctccaccactactttctctggaggcctgaggagggggtattatcacccaagaatgccaacgttcaggatgktcaggctccaagcgtgcttcagggctggccctttccagtccctcccccatgaaatgcaaacctagcccagcttgggtaggtgaggtgaa

SEQ ID NO: 1799 - DNA, 179 bp, Homo sapiens
gagaggggaaatcagaggggagaaagaagaaccagggggaggcaggggcacccagtggggacagagggaaaccctggaaaagcggaggcktggggcatggggagagaaagggaaaccagggaaggaattgggcatccggaagagaaaggggccctgagtggaggaagtgcacccccagg

SEQ ID NO: 1800 - DNA, 179 bp, Homo sapiens
aaaaaatttgtagagatgggcaacttgctaaattgcccaggctgttcttgagctcctggtgatcctcctgccttggcctacccaaagtgytaggattataagcatgaaccactgtgcctggccagcactgatatttaaagatggccagaggatgaggtgttcagagagggagagggaaa

SEQ ID NO: 1801 - DNA, 179 bp, Homo sapiens
accacccaagggtatgagatatttatgactgaattcttcccaaacaccgagtggctttgtctggaaaggtcagcagttcttagtctacamaaggaggccttttcttccaaagttctgacattctgagggacaattgcaggaatagacagctccttgggtttggtgctaatctaccattc

SEQ ID NO: 1802 - DNA, 179 bp, Homo sapiens
acctcaagtgatccacccaccttggcctcccaaagtgctgggattacaggtgccaaatcagtttctacattgggaaaagtgatactaacrtgggtaaccagcttccccactttctagattccctggcaggagctctgtccatgcctcaacccacaggaagtagcatgagtgcctaaagg

SEQ ID NO: 1803 - DNA, 179 bp, Homo sapiens
tatatacatatgtgtgtgtatatatacatatatacatatgtgtgtgtatatacatatatacatatgtgtgtgtgtatacatatatacatrtgtgtgtgtgtatatacatatatacatgtgtgtgtatatacatatatacatatgtgtgtgtatatatacatatatgtgtgtgtatatgt

SEQ ID NO: 1804 - DNA, 179 bp, Homo sapiens
tccaaagattgtctttagataaaaaagtgacatttatcctcatttcaaggtagaggcaactgagatccagaaaattcaagtggttgtccyatgttttgtaaagggcaactagctgcctctggctccaggctctcctggttcactttcctgtgcttgttcatcccaaagccattcccacc

SEQ ID NO: 1805 - DNA, 179 bp, Homo sapiens
tacccctagtgccaagtgtcaaaagtgatcatctctccgtagagatagtacgggagaggctacctcttcaccttctgtacatattccacrtgaatatgtattacttttaagccaaaggcatgtttctgaggccgcttttatcagaattctcattcccagcttgctgataggtatggggt

SEQ ID NO: 1806 - DNA, 179 bp, Homo sapiens
taaactaatttgctggctaacctaaacttgaagctgtgacaaggttcccaggctccaggcccctggcctttttgaccttatctccaagtrtattgcatatacaaataccctccctttcctcagagtcattgtgactctccaatgggataatagccattaaatgcacacacagagaagca

SEQ ID NO: 1807 - DNA, 179 bp, Homo sapiens
attttagacaaggtcttgctcggtcacccaggctggaaggcattggtgtgaacagggctcactgcagccttgacctctcaggctcaagcratcctctcccctcagcctcctgagtagctgggaccacaggcatatgccaccatgcccagctaatttttaaaaatctttttgtagaggtg

SEQ ID NO: 1808 - DNA, 179 bp, Homo sapiens
agtcctgaagaatcatccccatccctcctggaggtggaggagaacacacccaccctgaagccagggaatgccctcatttacatacatttrcatctcatttattccaacacccaggctgaagccgaggctaattcagctgacaggaaaaccccacccgctttagctctgctgctctgctg

SEQ ID NO: 1809 - DNA, 179 bp, Homo sapiens
ttgactcaccacctgcagaagtgcaaggtaacccattgcaacattatcaaagttgactttcacattgacccagaagaagctgccagtggwgttttgaatcttgcagtcagacttgttattcacaatcgacaaaggtacaagggaaaactctccatcggtatagttgatgcacctccaaa

SEQ ID NO: 1810 - DNA, 179 bp, Homo sapiens
cagtaaccactacacacttcactggtacgatcttaactcacagacctgcagccctcactgagggaaaggccttcccccaggctcctgcayggcgatgtgctgcacggacacgcatgcccacagtgtccactccaggctctcccgacagccctccctgaccccacccctcgccagctccc

SEQ ID NO: 1811 - DNA, 179 bp, Homo sapiens
caccacctggcacctcctagcccctcttgcctattctgcatctcaaaccctttctttaaaaacccccgcattccgggactgttgtggggkggggggaggggggagggatagcattaggagatatacctaatgctaaatgacgagttaatgcgtgcagcacaccaacatggcatatgtat

SEQ ID NO: 1812 - DNA, 179 bp, Homo sapiens
taccatcctaccaccaccaccagatttagccatgctgccctctctcctcatttccaggaccactgagttccaggcactctcccatattcmtcaaagactttggtttatagtctactttatcttaagtctcatgctactttcttatcacaatcttttatttattgacattgtcaacattt

SEQ ID NO: 1813 - DNA, 179 bp, Homo sapiens
ccttgtggctaaagtcagggggcccttctcagttcttgtcttttttgtttttttctttttctttttctttttttttttttgagacagggyatcactgtcacccggactagagtgcagtggtgcaatctctgctcactgcaacctctgtctcctgggctcaagcaattctcccacctcag

SEQ ID NO: 1814 - DNA, 179 bp, Homo sapiens
tttccctctgcttaggatcttatctcatatctacctcatttttttctctctccttgtctgccagctctttcctatcagcatttaaagatrcttaactttcctccaactttaaaaactttcccttgatgcagagcccatccaggtcttccctcctctctcctgttctctattggctttta

SEQ ID NO: 1815 - DNA, 179 bp, Homo sapiens
tgacaatttcctccttaaaatactgtatattttggctaccatgacactctcttggttttcctaactttctctcttctccttctcagtctytcctttctcagcttttcccatacatgattgtgaataatggcactctatcttttgttttcagaataataacaatagtaacaacttcaaca

SEQ ID NO: 1816 - DNA, 179 bp, Homo sapiens
atatgtcccacactgggacaggaaggcgcccctgggagcccttgcccagcctgaggccttgctctcctataggagagagctgggcaccayggaaaggggcagtcagcatccaccacaaggcttttccaagtgcaaggcactgacagccacaacaccaggaccatggaggtgccagcccg

SEQ ID NO: 1817 - DNA, 179 bp, Homo sapiens
tggagctggagcttgaggtcaaagcagactcagctatgagactgacttcatgccaaatgaccataattattctgggctaccataaatccytccagctaaggacaaaattgttttcaacattggggtgggaatttgtagtgatgtgatgtaggtatgagggaccagtccttcttttaaga

SEQ ID NO: 1818 - DNA, 179 bp, Homo sapiens
aactggtagttaagatatccccatcatagaactaagtacttggctatgttttatttctatattactgatacacaaacaagctcccttctytaatataaaatcaaaatagcctttggaatctttcattttggaagacaaacaaaacaaaacaaaaatgaaaacaactaaccaaccaacca

SEQ ID NO: 1819 - DNA, 179 bp, Homo sapiens
ttcagtgtcaaagcgaggggctagcacaaagtcacacacattgagccctgtcttggcaccagcggcttctacatgcaagccttcttctcyctttacctcttcctgctgccttaggagtagtgaggggcagtggggtcaggatgggcacaggtctccttcctgggaagtgtgagtccagg

SEQ ID NO: 1820 - DNA, 179 bp, Homo sapiens
ataaataaataaataaataaaatttaaaaaatagtatgttaagtaaaagaagtcaaacacaaaaggcctcatattttatgattccatttrtatgaaatgtcctttcatagacagaaaatagactagtggttgccaaggaaggggaggaaaagaagtgagtgctaatgggtatggggttt

SEQ ID NO: 1821 - DNA, 179 bp, Homo sapiens
aaatacagtgtcaaaagtcatcacttttttctcttgtaaatgtttttcactttgttctgacaaagtttgaagtaaattatgcaaatcctrtaccttgatttaaaaaaatctaatagcttggctaacagaatgcatgtctccataattcatttagggaaaggcttgttcctttgttaaat

SEQ ID NO: 1822 - DNA, 179 bp, Homo sapiens
cactaggctgttacatgaaaactgaattgtgacactttgttgattctaactttacgaaaacaaaattctgcgtacatgcagagaatactrtgtggaaggaaagacactcaaagtttgagtgtttgtatgtgtgtagtagaattatgggtaattctaattttttttttcttctccctttt

SEQ ID NO: 1823 - DNA, 179 bp, Homo sapiens
ccactgctctgatcctgatccttacttctctaacaagataacttgttgccttgagtttaggacaaaacgtcttgctgaagctgtgtatcrccactgacccggagaccatgcattctttgctttctgtgcccctttttgtttagttttaacaacttcgtcaatactaccaggacatttga

SEQ ID NO: 1824 - DNA, 179 bp, Homo sapiens
atggtaaaatagcaaatgtgattttaaatgatctcatgggaaatgctgaaacctgaggaagcaaagaggctgcacttagataacaatgcyccagcatccacaatagactcatagcctgggcaaggctgccttgactgtgggacaggctgtttcctatcattgaccccagagagcgaggt

SEQ ID NO: 1825 - DNA, 179 bp, Homo sapiens
gatttagctatattttcacccttatccttcagaggaagagatgcagtgggagtcttctatgcatatagattaatagtatttttccaagarctatgggtgtttgaggaaggtcatatattaaaacatcccacaaaacatgctttgtttttggtttatgaataaaatctgtaatccccctc

SEQ ID NO: 1826 - DNA, 179 bp, Homo sapiens
tggagaacagagaaaagcacaatatataaataccaaggtaagaagagtgaccatgggatctaatgagcaagatggaccaaagtgacattytaaggacaaatattaatagttctaagcctctcagaattaatgctggcaggcaagggacagaacgtatttgcttagtgagaagggtgaga

SEQ ID NO: 1827 - DNA, 179 bp, Homo sapiens
aaagtaatataattaagtagttgactcagaagtgctacccactttgtctgatttagcatcaaaacatacagtcttcctaatgtgcaactyttccaaccaacagttgcagaatttgagactaggtaatggatcttgcctgggactccagctaataagaggcagagctggacaacaaccca

SEQ ID NO: 1828 - DNA, 179 bp, Homo sapiens
ttaaatataaagaatttacaatgttccactttatttagtttgtaaatacttttgaatatggttcagctgccccaaataaaagttttctcrtttgtacaatgaggggattggtctgggtgtataatcccttctatcttgacaagaagccgtgttcctttctcctatttcgaatttcccct

SEQ ID NO: 1829 - DNA, 179 bp, Homo sapiens
aaccagagagatagtgtggttttgttgaaatagccactggactcgaagacaggaagcatgagttctgatgctatctgggtcttttgaatwctttgaccctcatttctgtaatttgtaaactggagatgattacctcggccctacttatctgacactgtaggaaaatcaaataatgtata

SEQ ID NO: 1830 - DNA, 179 bp, Homo sapiens
cctggccactttgtactcctttaactctctcttcatttttcttcataacacttttacgacctaatagtttacatttttgttcattatttrtctccttcagctagaatgttttccccatgaaagcatagattttgtctatttgcttagctgttgaaccccaaacactgagaataatgttt

SEQ ID NO: 1831 - DNA, 179 bp, Homo sapiens
aacagcagcccctggccactttgtactcctttaactctctcttcatttttcttcataacacttttacgacctaatagtttacatttttgktcattatttatctccttcagctagaatgttttccccatgaaagcatagattttgtctatttgcttagctgttgaaccccaaacactgag

SEQ ID NO: 1832 - DNA, 179 bp, Homo sapiens
cttgcttgttcattggaaccgagtctcacagacttccctggctgtttcttgaacacaccaagcacaatattgcctctgtttttcaacttrttcttttctctgctcatattctcttcatgtttataattacatagctcattcaactattaccttgctaaagaagactccccgaccatcct

SEQ ID NO: 1833 - DNA, 179 bp, Homo sapiens
tcatcaccttccacccagatgtctgacagaagtataaagtgaaattataatatttaactcccaatatactgtttccttagccttctcccrttttaacacattgtaacttcattattctagtaacttaggtcccaagccttaaaactttttaattacccattattgaaaggagtctctat

SEQ ID NO: 1834 - DNA, 179 bp, Homo sapiens
catttgaaacattaaatttatatctctagcccaagtctttcacttgcattccaaattcttgtattcagccgtctattcatcaccttccayccagatgtctgacagaagtataaagtgaaattataatatttaactcccaatatactgtttccttagccttctcccgttttaacacattg

SEQ ID NO: 1835 - DNA, 179 bp, Homo sapiens
cctaaacattttacatgtgtcatctcctttaatcctcacaagaacgctatggtctaagtattattattccaatttaaaagagaaggttgrggacagtgacacacacctggacttacagcactttgggaggccgaggcgggaagattgcttgaggccagaagttggataccagcctgggc

SEQ ID NO: 1836 - DNA, 179 bp, Homo sapiens
agggcccaggtgtcatgtggaaatggctgcttgggtcagggctctgctccaggccactgcttactggaagggaagagggatttctttttyttttttttttttttgagatggagtcttactctgtcactcaggctgaagtgcagtgatgcgatctcggctcactgcaatctccacaccct

SEQ ID NO: 1837 - DNA, 179 bp, Homo sapiens
gtagtagtggtggtagtaatggtagcaatgatagtagtagtggtggtggtagtagtagtagtgatggtggtagtagtggtagtagtagtrgtggtggtggtagtagtagtggtagtagtagtagtggtggtggtggtggtggtagtagtaatagtagtggtggtggtggtagtagtggt

SEQ ID NO: 1838 - DNA, 179 bp, Homo sapiens
aatgctgatcccaagtgacagcagaaccggaaaacagtgaccactcatcagcgaggacatccagccggcacaggcatgtgatgccaaacygggagaatgtggcccctggtggcctcaaacaatccagaacctggtgtgaacacactctgcctatgacaccgaggcagaagaatgcagtc

SEQ ID NO: 1839 - DNA, 179 bp, Homo sapiens
cacatgctttgagttcagtgaattgtcaaactcctgttggtttgggccaaactttcttaagcataatccctcttaaagaggtggcctttrtaaatcctattacgactctggcagcatgaagcatccttcaggtgtctcatgtgtgtaatgaatataacatccaaccagagaagatgatg

SEQ ID NO: 1840 - DNA, 179 bp, Homo sapiens
cagcagttatctgcttttgaagatgtgggtttagttagtttctatcataaatgtcataaaaattcaaagagatcatcaaataagttagakatatatatatatattttttttggttgttaacggaatctttagcagactgccacatcacccagggccaaggaggactttctgggctgggt

SEQ ID NO: 1841 - DNA, 179 bp, Homo sapiens
tggatccaccctcaccagctatacaattttgggcaggatatttaacctctctgagtcttagtgctctcttttgtcatgtgagggtgatgwtaacctcataatgttgttgtgacactgaaataacattcataaagcacctgactcattgcaggcaccaagcacatgactttcttgcttta

SEQ ID NO: 1842 - DNA, 179 bp, Homo sapiens
tccagtttatgaggtagacatcttgtttctttacagctcccaccccatctgctttcttatttttaaaaagtctttattatggaaattttyttttttttttctttttttttttttttttagtatttattgatcattcttgggtgtttctcggagagggggatttggcagggtctaggaca

SEQ ID NO: 1843 - DNA, 179 bp, Homo sapiens
agagccctgtctctcatctgccggctttcataggaccagaaagtgtggagcagggccccggggctggctgaggcagccccttccctccgsttcccttctttctggctgcagtctccccaggggtctcccagcccagtgcggccctgcgactgcaggtagcaggccctggtcaggctctc

SEQ ID NO: 1844 - DNA, 179 bp, Homo sapiens
atccagtatatagtgaaatccagtatggattgtatcttgttaagagtaaataatactaacaagtgatggaggaaaatttaaagcagcatsatgtctaaactagatgccaaagaaaagttccgacttcctgatgcttttgttacaacagcaaccttgtttccatgtttcctcccttccac

SEQ ID NO: 1845 - DNA, 179 bp, Homo sapiens
tttcctcccttccactgtcttccccttccctccccaactctttttctccttaagtgacaacattgaaaatcgtggctactgttaattgtrgtcataaaagtaattacattggaaggaaacagacaagtccaaagattgtctttagataaaaaagtgacatttatcctcatttcaaggta

SEQ ID NO: 1846 - DNA, 179 bp, Homo sapiens
ggtactgagaacctgggtcttgggagtgtgttctccaaaagtgttcttgcttcttcatataatactgggccttgtttatactcctgttcytcccctctggggatacaggatttttgtttgtttggttttatttatttatttggcctcccctggccgcagtgggtttccaccagtgtctt

SEQ ID NO: 1847 - DNA, 179 bp, Homo sapiens
caggggcacaccagcactcaagctcccttacaactcctccagcctaggtcagtttaatttgtctaggggagtaagataactggaaatgaygaaggttgcattctccataccctaaggcaaaaaaaggctggattagaacagacctcctgctcaaggttagagggatgcaatcacgctct

SEQ ID NO: 1848 - DNA, 179 bp, Homo sapiens
accattgtggaagacagtgtggcaattcctcaaggatctaaaactagaaataccatttgacccaggcatcccattactgggtatataccyaaaggattataaatcatgctgctataaagacacatgcacacatatgtttattgcagcactattcacaatagcaaagacttggaaccaac

SEQ ID NO: 1849 - DNA, 179 bp, Homo sapiens
gctcttccaaggggctaggcaacccatttcctgtaggtttcttaattaactctgagggcagccttgtttctatgtcttctgtagaaatcyaccatagccactgcatataaacagttcactgctctgaggattaaatgagatcactgtatagtgtcttgcacttctgcatagtaaatatt

SEQ ID NO: 1850 - DNA, 179 bp, Homo sapiens
aaaatctgcaacatgcctttggcctaaataaactcctctgacaattcttactccattcagttcatacaattaatcttttgggggcttaaytcctattttatctcttgttcttggagcagtgcccatcatatagtacgtaattaataacatttgcaggatgaatgaaagaaactactggc

SEQ ID NO: 1851 - DNA, 179 bp, Homo sapiens
aagcttccaaccatgaggactaagcaaatgatactagtagtcactatttattgttatctgtcagacatgtataaaaatgtaggcactttrttatttcatttaaccctccagctatttagaaacctttttacaaggggagataaggaggcttggataatttaaaggacttgctaaatgtg

SEQ ID NO: 1852 - DNA, 179 bp, Homo sapiens
cagaatatctagacacatgataatctcaggaacagagaaaggagggtgggggcccatcacaagagaggcataaatgccttcagtgaggcwttttctagagtgctaatgcactcccagcgagccctgcaggatgcctttgactttaaggctctgttttggtgattccatttgccctggag

SEQ ID NO: 1853 - DNA, 179 bp, Homo sapiens
ttgttgtccttgtttttgtcagcttttcgcaagcaggagtgaatccagctgggcaagaagtaaggaaagaacccaggaaccctggaaccyaccaaggtcccagccagagccatggatggctccagctgaagccacctatagccacagctccctgcaggcctgacttactacacatccat

SEQ ID NO: 1854 - DNA, 179 bp, Homo sapiens
tgggtatatacccagtaatgggatggctgggtcaaatggtatttctggttctagatccctgaggaattgccacaccgacttccacaatgrttgaactagtttacagacccaccaacagtgtaaaagtgttcctatttctccacatcctctccagcacctgttgtttcctgactttttaa

SEQ ID NO: 1855 - DNA, 179 bp, Homo sapiens
tcacgggtgtgtgggtacagccgcttgctgggtgtgtctgcttggccagggatgtgtatgtggggttctgtctgggacaactggacaggsagtggacaggaaggggtcagctctgggcagcccctccacctgcccaaggccaggtcccctctgtggctcagatcttcctgtggcttggg

SEQ ID NO: 1856 - DNA, 179 bp, Homo sapiens
ggactatttttgtaaatgtgccctatgtacttgtatttgtacccttttggtaaccttaggttttgtgtggctttctgtaaacagaatttrtttgaatttttaaaaatcttgactgacactctttttcccagagtccatttaaatttaatgtaatttatgaatatttttgtttttgaata

SEQ ID NO: 1857 - DNA, 179 bp, Homo sapiens
gcgacgtgtgggtgctgcctcaacaggtattgggaacttgctcttgtttacagcttggctcctcatggtagctgtaggaggcaggatctrggtggatgggacctgggattcattcttagaataggtccccaaatggtcatccattttgcttgccgagggctctgtggggcagacgtagg

SEQ ID NO: 1858 - DNA, 179 bp, Homo sapiens
tggcacctcctagcccctcttgcctattctgcatctcaaaccctttctttaaaaacccccgcattccgggactgttgtggggtggggggrggggggagggatagcattaggagatatacctaatgctaaatgacgagttaatgcgtgcagcacaccaacatggcatatgtatacatatg

SEQ ID NO: 1859 - DNA, 179 bp, Homo sapiens
tttgtgttggaaatatttagttcttagaattcacgttataggtttggattttataattgataagcctacctgactacttactttatagtmctcattttgaataattattataagagctttctgtcctggaataattatggctttcatttattgaaacaagtagtcaataattgcctagc

SEQ ID NO: 1860 - DNA, 179 bp, Homo sapiens
cctttactgatttggattccctttatttatttctcttgtctgattgctctggctaggacttccagtactatgttggatagaaatggtgamagtgggcatccttgtcttgtttcagttctcagggggaatgctttcaacttttccctgtttggtataatgttggctgtggatttgtcata

SEQ ID NO: 1861 - DNA, 179 bp, Homo sapiens
agcttgagacttgggacacatgaacctcactgtgtgtgagtgtgtgtgtgtgtgtgtgtgtgagagagagagagagagagagagagagaragagagagagagagagatgcaagagagatagagtgaaacaaaaatagaccaagagaaagaaaaagaaagagacacagagaaacagagag

SEQ ID NO: 1862 - DNA, 179 bp, Homo sapiens
cataatcacagccaagtacacaaccacaaatatgaagctgcaaaaactctacatcagacatgaccacggtcacacacaaccatcaatccrcagagacacaccaacacagacacacgatcacacatcatcaattacagccccacacacccaaccccaattaacagccatacactgtcaac

SEQ ID NO: 1863 - DNA, 179 bp, Homo sapiens
atcacttaataatcagccttctgaattcttttttttttttttttgagatggattttcactcttgttgcccaggctggagtgcaatggcgygatctcagctcaccgcaacctctgcctcccaggttcaagcaattctcctgcctcagtctcctgagtagctgggattacaggcatgcacc

SEQ ID NO: 1864 - DNA, 179 bp, Homo sapiens
acctcattctgatatttcatagcctgacgtcaacggtgaagcctctcaacctctctaagcccagtttctccacgtataaagtaaggaccrttttatccaccagattttcactgggttttattactcaaagataaattgcaagctacaaagactgtgtgtgtataagggattgttattat

SEQ ID NO: 1865 - DNA, 179 bp, Homo sapiens
gcacaaagtaggggctcagtaaatgcccattgcataagtcctctcttcctcctccgtcttacccttcctaccatgttatctttgcctccrcctagaatatcctcttggtcaacctccacagtcaaaaacttatcttctgcagccaagttcagctggaagtgactgcagtttattccaca

SEQ ID NO: 1866 - DNA, 179 bp, Homo sapiens
ccacagtcaaaaacttatcttctgcagccaagttcagctggaagtgactgcagtttattccacaggctcacagtctttggcctgtttttkcctatgacacagaccctgctcctccctgatactgcagcctttgggtcatgccctttcctccaccctggtcctgtgctctgtgaaggcca

SEQ ID NO: 1867 - DNA, 179 bp, Homo sapiens
tgtggatgctgccaactcccagtaagcatcttgagagcctctttgacttcttatgggctaatagtgacagaaaagggagagcaaggcctyggcaaatctgtattcttgaggcatgtgagatgtatcagccactgtgctttgtaattatacaaatggaaaatcttatgaaatgatcaaat

SEQ ID NO: 1868 - DNA, 179 bp, Homo sapiens
aaggaaggccagattaaaaatgactgcctggtgagtattgaggtgggaatgctgaactccttcctctctctcataataggaggatgagtygatgtcaagaagcatctgtcagctcagggagcgtaaagtgctctcatccaccctagcagagatggcctgatcaatgaaacagcaatgcc

SEQ ID NO: 1869 - DNA, 179 bp, Homo sapiens
gtaacattctttccctagacctcctcgggcttggttctttcatgttattcaggtctcagttcagtctcctccttcaaggggctttccctscccagccagtctagagtcacccccacgtctctccatcacattgtcctgttgtatttccttcatagcactagcccctatctcaaattatc

SEQ ID NO: 1870 - DNA, 179 bp, Homo sapiens
gaactgatctcaactaagttacccaaacaatctgatgaaactaattcccatgaaagtttgtacctcttcacttatctccaagtttctaamttttctttgtcttttagaataaaaaagacatttgccagatgaaatttcaggccattttgtatactgaaatgaaggcttcggggcagaag

SEQ ID NO: 1871 - DNA, 179 bp, Homo sapiens
aaggcgctctgccaccatggccacccacagtttgacctcccacccagccttggtagcttcaacctggactctggccaggcttactggggrctgagcctctgagtggggtatggagactgcacaggcctgagcctgttctgtaaccacaggaaggatagctcctgctggtatgcagaacc

SEQ ID NO: 1872 - DNA, 179 bp, Homo sapiens
aggtggggaagccctgggagtttgcccttggctggctctgtggccaatggccaccgcagaggcattcctggcacctagtgtctcattgcrtccctctggaatcaaatgtccttgctcccaaagagacatttaactctgaacattatcttgtggatggtttcccaccaggaataagctat

SEQ ID NO: 1873 - DNA, 179 bp, Homo sapiens
gcttacgggaacttttttgaggaacactgctatgtcatcctccacgtgagtcgcttggggaagtctgcctgagaggggtggcatggcccrgcactggggagactgaggcacaggcataaactctgccctgggaagcggcaagttgagagccggagaatcacatcccacaagggggcggt

SEQ ID NO: 1874 - DNA, 179 bp, Homo sapiens
agtccaggactctgtgtccatcactactgcaataacacggcatctctagaaggccctccagcaaaggctgctgggtttctgggacaggtyatgtggaccgtgggtccagcctgtactcttccatggcatgtggctgccttgctgagaaacctattgtacatacagggggactgtggcgc

SEQ ID NO: 1875 - DNA, 179 bp, Homo sapiens
ggagctgagcagtgacaggagaagtctctgctgtgagagggcacactggtgacaccctgactcccaggtcctctcccgcaggggctggcyttgacctacagcctccgggacagggaacgtggtggtggtcgtgcacagattggtgtggtggatgatgaggccaaagccccggacctcat

SEQ ID NO: 1876 - DNA, 179 bp, Homo sapiens
tttcctggtaaaagaggacaagagctgctggctctactgtcttcctcttcttgattctccctgccttgaatgaggacataatgcttggcrcttacaaaacctctctcagccttgaaggtaaggctgggagatttgcagaaacattggccttgatgacagtgaaccatagaactaatacc

SEQ ID NO: 1877 - DNA, 179 bp, Homo sapiens
tctttgtcatcacagtggagcagctggccagccagagagaagtcactgcagcttcctcccctggttccagactcctaggctgtgtccttyattctgctccccagccctctctgtccctctctcaccttctctggcatcaaccctgtaccccactgcttcacacctttgcatacaggcaa

SEQ ID NO: 1878 - DNA, 179 bp, Homo sapiens
atctagtttctaccttgtaattgtaccaccaggtgaacttggaaactggctctagtgaaattttcaaaagataatcttgcatttggatayatttccaaaaactccgtgtcatgcaagatgtgtatattgcatcccttttccaatgtttcccattacaatttaggaaatgcatttgtgca

SEQ ID NO: 1879 - DNA, 179 bp, Homo sapiens
tggaagcggccctggtacacgtccatctctggcccaggtgtctggaaattcagggccactacaggcaggacagagcagtcacaggctgtrggctggccctggggccctagagcacagcctgctcagggtacactaaggcctagggtcacatggtgagttagcagggcccagcatcactc

SEQ ID NO: 1880 - DNA, 179 bp, Homo sapiens
aaataaatcctctaaatcgagtgaggttggccagagatacctagcattttatggttggctgaagatacccagcattttattaactctttrtgacttctttatcacgagatttgagtcacctgctactaagacacataaatagattgtttggtcaacacacaacatgtggattaaagtat

SEQ ID NO: 1881 - DNA, 179 bp, Homo sapiens
tgaaattctctgcaactgtgaggtgaaacaggacaaggttatagaatctggtgaagccatgatctactcccacagtcttagggcctggaygaaaatctttctggattttggaggtcagaagccagtattagggagttttggaaaaagagacctggcaccaagtggcaggtattcttatt

SEQ ID NO: 1882 - DNA, 179 bp, Homo sapiens
tcacactccatctgccaaccgggtgttcagaagccatgctgacctcctgccccaggccctccttggacatagcctgggcaggcagccctyacagctacctgatcatctagggcagcaacccagagcccctgagccagtgttcatggcttcctcctcctctggggtgactccacccctgt

SEQ ID NO: 1883 - DNA, 179 bp, Homo sapiens
tgcccactgctgacccattcttgcaggagctcccccaccctccatcctggctgtgctgtgatatcacaaggtcccagggctggggtcagmaattctctcccgagggaatgaagccacaggagccaagagcaggaggaccaaggccctggcgaaggccgtggcctcgttcaagtaatcca

SEQ ID NO: 1884 - DNA, 179 bp, Homo sapiens
tgtcctcaggcccctcatgtgtcccattggtgcccccttctcctgccctggccctgatacttgccccgattcttgctccagagccacccrtcccacaaggaagtggtggatggcagcccggcagcagcatcaaccatctctgagataacagcagtgagtcctggggcccctagccttcc

SEQ ID NO: 1885 - DNA, 179 bp, Homo sapiens
caatcctgtaaaatggatgcgctgtgaaagaccctggatggtaaaacctggaccctatgctcagttacagcaaggagtccagtggcaggkgctgccatcctaatggggcgattaaagaagcaactggacactttcaccctgccattttgactctgggagatattttgcctgggttctta

SEQ ID NO: 1886 - DNA, 179 bp, Homo sapiens
aaacacacaccaccctcatgtatgtccacctatagatggacatgtgtgaatatccatgttcacctacacacatatatgctgttgcccacyttcatgcactcaccatctagacttacagggataaacaaatacacagtgtgcccccaaatgtatgtacatgtacacatatatgcatgtgt

SEQ ID NO: 1887 - DNA, 179 bp, Homo sapiens
caccaatgttgttttgagtttgcttttatgttactgtgctggtaggaatatatctttcgctgtaaattgcttcacaggtgttttaaattracactagcaatatatttggaaatataggaaattgctatttgatcatttccatttcatacagttgaacctatatatgcatatagcatata

SEQ ID NO: 1888 - DNA, 179 bp, Homo sapiens
aggcaatggcacacatggggacgagccaaatgcctgtgacacaggcatcccttcacacacagggaccctgcattgtgtctgttaaacacmgtcacacactagctgtaggtcttgctggacacagactgcccccgagtccccaagtccccagacccctgtaacagagacctttgtggggt

SEQ ID NO: 1889 - DNA, 179 bp, Homo sapiens
gtatacagttggatgagttttgacaaatgcatacacctgtgtgagtgccactccaataagacagcaaacatcccctcaccccagaaagtyccactattcctttcagtcaactgctctgatttctatcacctaggttggttttgcctgttctggaacttcatgcatatggaattctacct

SEQ ID NO: 1890 - DNA, 179 bp, Homo sapiens
tagtagccacttaacagcatcaattccctcatgttcacctttccagaatgatctcacaagaatccccgttctgtgctttctcacccggargccttatgtggatgtattttagaatcacctggggagctttcaaaaatatcgatgcctgatctacccccatagacttgctatagccaggg

SEQ ID NO: 1891 - DNA, 179 bp, Homo sapiens
agagtgtttttaaaaactggattagtagccaatattaaagacatttgcacaaaaatctggatttctgacttttttggaaaattagtaacwctgacaataatggacaggccatagctcgtccttccctccctccctccctctctctctccctccctccctccctctctctctccctccct

SEQ ID NO: 1892 - DNA, 179 bp, Homo sapiens
gaaagactttagccctggtcagccagacaattggtggaaaagttaggattccaactggcatttccagatcccaggacagtgctctttccygctccacccagcctcaatctcaaactgaaaaatatcaggatcccagaaagtgaggggtaagtgactcatgatacaggtcagcatcacag

SEQ ID NO: 1893 - DNA, 179 bp, Homo sapiens
ttggaggctttgttcatttctttttattcttttttctctaaacttctcttctcgcttcatttcattcatttcgtcttccatcactgataycctttcttcctgttgatcgcattggctactgaggcttctgcattcgtcacgtagctctcgtgccttggttttcagctccatcaggtcct

SEQ ID NO: 1894 - DNA, 179 bp, Homo sapiens
cacatgagccagtttatccacccagatggtcccagctaatcatcaagtgcagggtatgcaaaatatctcaagcactgatcttaggaactrtttagggagggtaagaatcttgtagcctccagctgcatgactcctaaactataatttctaatcttgtggctaatttgttagtcctacaa

SEQ ID NO: 1895 - DNA, 179 bp, Homo sapiens
cttagtcacagagctcatcaccctcctgggacttggtttccacttcaagaaaatggggaggaactctgccctgtctaccctacaacttayagaaaaggtccaagaactaattattggtctggattttaatgccttttgtaaaactgcatttaaagacattgcttgtaatattacctgaa

SEQ ID NO: 1896 - DNA, 179 bp, Homo sapiens
tcctcactctgtgttatcccgtctttaccatatatgaagggtccatatataagcttgggtctgcttccttttgtaattgattctcagctraattgtattatcgtctgaaaacatacatatacttttaatcccttgaacattgtttgaattttattctatggccaggcatacggactatt

SEQ ID NO: 1897 - DNA, 179 bp, Homo sapiens
tgagtctcctcatctgtgaaatggaaatgtagtaataccagccccactcctggatcctgtgagggctaaagggttcactgtggaccacaragggctttgcaaatcatcctgatggccaccacaattgctcctctggaagaatgtctcctgcctttcctgcctctgtaccccctacctca

SEQ ID NO: 1898 - DNA, 179 bp, Homo sapiens
ttgactcctggcaggcccccttgaagaggggtggaggtggggatggggatggggtggtgggacccctttcctgctagggggaggagggargggaaggctaggcatcccaccctcccattcttgcagcacccagctgcctgtgagcctgccctgggcctcagtttcccctctgtgtgcct

SEQ ID NO: 1899 - DNA, 179 bp, Homo sapiens
cccttgctggcacagataataagagaatattgctctttcttatcataatttgttattattttgaattcttttcataagcagctagcagcyggacggatccttttgctggttacagtcacatcttgggtgaatgttttatcctaacatctatgtgaagactcttgcaactctgacattat

SEQ ID NO: 1900 - DNA, 179 bp, Homo sapiens
tctgtgagcaagactatgactggctgtgggcgaatgatggatgggtgtgtttgtgggtctgtgtttctgcgcacagtggtataactggcygggtgtgcgtggctgtgtaaacaagtgctgttgtgtttgcatgcagctctgtgtctgacaacagtggatgacagtgtgtggctatggtt

SEQ ID NO: 1901 - DNA, 179 bp, Homo sapiens; identical to SEQ ID NO: 1376

SEQ ID NO: 1902 - DNA, 179 bp, Homo sapiens
tgagccatctctttgcctgctagggctgtaatggtgatcagcgtgagatggcacgggtggtggtcactgtcatttccaggaagaatgagraaacggtgctggagggtcaggagcctccccacttctgggaggccctgggaggccgggccccctaccccagcaacaagaggtaacagggt

SEQ ID NO: 1903 - DNA, 179 bp, Homo sapiens
gctcctgctgccatttagaggcctgaaggagacaggtggagtgagaggggaaggaacaatggtgactgaactgactgccgcttggttgasagcgggcattggtgacttaggaaagagccattgccagggaattcaagaacaaacagagcgggtgggctgaggggagatgggggaagagt

SEQ ID NO: 1904 - DNA, 179 bp, Homo sapiens
gcagggtgggcagcctgcgtgccgccacgcccagcaaggatatcaaccagctgcagaaggccaatgttcgcctgtaccagtgagtacccytggggtgggcaggggtgggtgggacagtccaggactctgtgtccatcactactgcaataacacggcatctctagaaggccctccagcaa

SEQ ID NO: 1905 - DNA, 179 bp, Homo sapiens
agaatcagaccaaagtggcctttgctcatggcagaactgctggctcacatctttcctggggcaggagggggattgctgagccactaatcscttccatttcatcactgaaaatggtgaaaaaatacaggcccattcatggtcacatgacttctaattaaacagagcaggcaacggcatcg

SEQ ID NO: 1906 - DNA, 179 bp, Homo sapiens
ttaaaaaatttttttaatttgtagaaatttatagaaaaggtgaaaaaatagtacaacaaacattgatacatttactttacatatacatakgtaaattctgcaaccattgacaaagttgcagacatgttttatttctaaatggattgctcaggagtatgcatcatctaagaatgaggatg

SEQ ID NO: 1907 - DNA, 179 bp, Homo sapiens
cattgccacagctccttccacatcctgcagcccagggcgggaccaccagatgtggggacacatgcgggcccatggctgctcccctccagygcaaggagccagggcatctccaggagtgggctccaggacctgagtcaacagttctcactccccatccctgtctgccctcagagagggac

SEQ ID NO: 1908 - DNA, 179 bp, Homo sapiens
catagcaggccttctcaaaagcataccttctctaaggcatacatttgtgtgtgcatctagcaggtgagtgagtgtgtgtgtgttgggggrgggtgggggcgaggagactcatcttcccaggccaccttagactttctggggctgggactcaggcatttaaaaaatctccccaaaaattg

SEQ ID NO: 1909 - DNA, 179 bp, Homo sapiens
atgcccaagatatcatatattactcattaaacaaatttatgtaatataaacacaacacctttatttatgtaatataaagataaaaatctygccaaaaaatacgtgctctaaattcatcacagtggttgtctctgggatggaaggaaagagaatcagaatgggaagggatacaagggata

SEQ ID NO: 1910 - DNA, 179 bp, Homo sapiens
tgtggcctttcccccaggcctcctgttctcagccccaacctgcacctccaccatctaagatgcctcctggtcctgactgtttatggatcygagaccccacttgcttctttgtccacctccacccctggaattagcacagtgaagaaaacagaaacacaagacagttactactcttccag

SEQ ID NO: 1911 - DNA, 179 bp, Homo sapiens
aaaagatccctctggctactgtggtaggatggtcgtagcggccaggcagacccagagacacagagggaggctggctccggagcaggcagkaggcgtgagagggagggccaggcccaggatccaccatgaaccagctgccgacgggccagtggcttgcgggagagagaaatcagggcaac

SEQ ID NO: 1912 - DNA, 179 bp, Homo sapiens
gcaaggacctgtgcaggcggggaagccatcgtaagcagttggctggagactgtgtcgctcttgtcagggaatggtgcacctgtgggatgstgtctccagtgcacccaccagagcaccccacaagagaaagagccagcatttggacatctgacccacccagagggcaccagcaacacttt

SEQ ID NO: 1913 - DNA, 179 bp, Homo sapiens
catttgacccagaaatctcattactgggtccatacccaaaggaatgtaaatcattctattataaagatacatgcatgcatatgttcactycagcactattcccaatggcaaagacatggaatcaacccaaatgcccatcaatgatagactaaggaaaatttagtacatacacaccatgg

SEQ ID NO: 1914 - DNA, 179 bp, Homo sapiens
attaggcagatcattgagatagaaaattaacaaagatattcaggacctgaactcagctctggatcaagtggacctgataaaacagaactytccaccccaaaacaacagaatatacattcttctcattgccacatggcacttatctaaaatttatcacataatcagaagtaaaacattca

SEQ ID NO: 1915 - DNA, 179 bp, Homo sapiens
gcaggcctccttgagctgtggtgggctccacccagttcgagcttcccaggggctttgtttacctaatcaaacaactaactcagcaatggygggtgcccctcccccagcctcgctgccaccttgcagtttgatcttggactgctgtgccagcaatgagcgagactccgtgggtgtaggac

SEQ ID NO: 1916 - DNA, 179 bp, Homo sapiens
gccttccatgtacccaccttgtccatatccccagcctgcccagcttgtactccagcttttttgacctctccaggtcaaaactcaagggayggggcagggagacaggtaaagggcaggaaagagattgaatgcctgggacttccctaatgcatcgctcccggagttggcaggtggctctt

SEQ ID NO: 1917 - DNA, 179 bp, Homo sapiens
atcaacccaaatgcccatcaatgatagactaaggaaaatttagtacatacacaccatggaatactatccagccataaaaaggaaaaagawcatgtcttttgcaggaacatggatggagctggaagctgttatcctcagcaaactaacacaggaacagaaaaccaaacatcacatgtcct

SEQ ID NO: 1918 - DNA, 179 bp, Homo sapiens
gtgcatcacacagagaactgtgagcctcggcaaagactttgatcttatcccagagtagtgggaagtcttggagtggtttaaacaggttarcagtgtaaacagactgcattttagagagacctcttttgctgctttgcgacttggtggtgggggtgttggggggaagacacaaagagtag

SEQ ID NO: 1919 - DNA, 179 bp, Homo sapiens
ggttttgaagagagtggctatcccttgctttcttttgccagctttccctctgcagacacactctgctctggcagttatggctcaaacttscaggaagttgtcatcatatccgctgttggcccctcttctgtacattttgtccttttacaattatttcactgtcggctggggactgtggc

SEQ ID NO: 1920 - DNA, 179 bp, Homo sapiens
gttgaactagtttacagtcccaccaacagtgtaaaagtgttcctatttctccacatcctctccagcacctgttgtttcctgattttttartgattgccattctaactggtgtgagatgatatctcattgtggttttgatttgcatttctctgatggccagtgatcatgagcattttttc

SEQ ID NO: 1921 - DNA, 179 bp, Homo sapiens
gacaggagaattgcttgaacctggaaggtggaagttgcagtgagccaagatcaccccacttcactccagcctgggcgacagagcaactcygtctcaaaaaaaaaaaaaaaaaaaaagaaaaaagaaaggaagaaagaaaaagaagggtagagggaaaattatgttttgtcccctacctt

SEQ ID NO: 1922 - DNA, 179 bp, Homo sapiens
acgttgactggaccaaaaacagattaatagcttctgtattagtctgctagggttgtcataataaaataccatagactgggtggctaaaasagcagacatttagttctcacagttctagaggctgggaagtgcaagatcaaggtgctgacagattcagttcctggtaatggtggccacca

SEQ ID NO: 1923 - DNA, 179 bp, Homo sapiens
tgcgggctcttttttggttccatatgaactttaaagtagttttttccaattctgtgaagaaagtcattggtagcttgatggggatggcaytgaatctataaattaccctgggcagtatggctattttcatgatattgattcttcctacccatgagcatggaatgttcttccatttgttt

SEQ ID NO: 1924 - DNA, 179 bp, Homo sapiens
tgcacccagtaactcgtcatttagcattaggtatatctcctaatgctatccctccccgctccccccaccccacaacagtccccggtgtgwgatgttccccttcctgtgtccatgtgttctcactgttcagttcccacctatgagtgagaacatgcggtgtttggttttttgtccttgtg

SEQ ID NO: 1925 - DNA, 179 bp, Homo sapiens
ggagaatgagcgagaggttgaggagttagctctgaagcaatccagatgccctttgcctgagtgcattccttcctccctcttccccagggyctcctgatacatgatcagttgtgaaatgttttgatttgtgtagtcagaaaggtttttccaccaatcttagtgcagaagagacaatgttc

SEQ ID NO: 1926 - DNA, 179 bp, Homo sapiens
agaggcacagtggggcgggctggaggccgcaggggcagagtgggccgagggcctctgatgaggtgtgaatgagggaggcagagcagggcyggtgtggacagccctgtcccagccctatctcccgtctgcgacaccctctccacaccccagtgctgataagcgggtgtgagccacggccg

SEQ ID NO: 1927 - DNA, 179 bp, Homo sapiens
tttagtagagatggggtttcaccgtgttagccaggatggtcttgatctcctgacctcatgatctgcctgcctcggcctcccaaagtgttrggattacaggcgtgagccactgtgctcggctgcagtgggttcttaacaatgtaaaacaaattttttaaagacatgtaaaaagacatcac

SEQ ID NO: 1928 - DNA, 179 bp, Homo sapiens
aattaatcataaaaagtaatgtgcaaaatatgccttttgtagtagcaacaaactatgtcctagccgtaaatataataaagttgtgcaagwattttatgaaaattaatgtcatatgttattgaagggcataaaaaatctgagtaaatgaataggcatatcttgatgttggattggaagac

SEQ ID NO: 1929 - DNA, 179 bp, Homo sapiens
attaccacccaggctggaatagtcctgttctcccggactgtcagctgcacaccaaactgctgcctgactcatgcgtctcctctccagcaytgatgcagaaggagacctctacagttaactcacctccaacaactatacctccaagaaggccctggaatcctggggcatcagaaaaagga

SEQ ID NO: 1930 - DNA, 179 bp, Homo sapiens
gtaaatatttaaaactggctcttcaagcaggaggcaggagagccctgatctatagcatttacaggtttccttgttttctgaattctgtgktatagatcctgatccccactcaccaccatggtagatttcaagctaccaatatgatgtcactggacagagctggaaaaagaacaagtcaa

SEQ ID NO: 1931 - DNA, 179 bp, Homo sapiens
gttctatattggggctagaactgtggaccataagctaaattgtgggactgtttttgtaaataaagttttattggaacacagtgactcctrtttgtttaagtcttttccatggctgctttgtgctacaacaacagagttgagtagaggccatacagccctaaagcctaagatatttacta

SEQ ID NO: 1932 - DNA, 179 bp, Homo sapiens
ggaggagagacaggaggtatctctggctgttagagagatggtagtcagagctgccgttctggaacagtccctggatttcaggtatttcayctctgctgctctgtacataagcctggtctaggggctctggttgcccagaaacaggagtttggactttgaaacaaaaggctgtgttttgt

SEQ ID NO: 1933 - DNA, 179 bp, Homo sapiens
ataagcaagcaaagcagaggcaggttggggaactcaccagcctcgagtgcccaatggtgatgatgaagtcaaagtagggctccaggcccrcctgctgggctggggagttctcctgcacctatcccacagcaaagaccacagtcactgcgccaaccctgggactctccaagtagccctct

SEQ ID NO: 1934 - DNA, 179 bp, Homo sapiens
ttgtttctgattcccgtcagtagaatccaagagacctggcctcatcaggaatccagagccatgagacagaggtgtaacccaggacttcaraaggcttgctggcctagtgcagtgtttgtcaaagatagtgaacatcagaatcacctggagagcctgttaaagcaccagttgctgggttc

SEQ ID NO: 1935 - DNA, 179 bp, Homo sapiens
gataggatgcctgagcccagagaaactggggcggagcctggacttatcttggggccactccttcacctgggtcaatattgacatggagcrggctgggccttggagataagccaggcaggaacaaagtaggccccaagccctggaaacttgatgagtgagggggtggtagatgaagggag

SEQ ID NO: 1936 - DNA, 179 bp, Homo sapiens
taaagcagtttatagcactaaatgcccacatcaaaaaactagaaagatctctaattaacaatccaacatcacaactaaaagaactagagraccaagagcaaacagatcctaaagctagcagaagacaagaaataatcaagatcagagttgaactgaaggagatagagacataaaaaact

SEQ ID NO: 1937 - DNA, 179 bp, Homo sapiens
aaggctgagagttgtggcagtgcctgaggctgaggtatcctcatgagtgtccactggtccccgaaataggtgggaaggacacacggggcrtcaagagggcacttatttgggacttggacatgctgagatatgcccttccgtgttttctagtttgagcacatatcatctgtgtgtattac

SEQ ID NO: 1938 - DNA, 179 bp, Homo sapiens
tctcttcatgatatctgattcggatagcaccagtgtcaatttcataaggtaagtcttatccccattttgtggatgagaaaacaggccagygagacaaagctctgcagtctgctctatcacaagatacaggattctaccaggcatgtatattcatcccaaataactcaggacacagtatg

SEQ ID NO: 1939 - DNA, 179 bp, Homo sapiens
gtcaatcaaaaggtttgcaatgatttccttcctgccaaaaataaacatgtgaaactgcactcttttgtggattgactacttttctaccaraagcgcctctcctccctcccttccccgcctcctgcgcagcctcatgccatcaccttgggtctcctggtatccccacttccggggaacag

SEQ ID NO: 1940 - DNA, 179 bp, Homo sapiens
gaagtgagtgctaatgggtatggggtttctttttacagtgataaaaatgtctggaattagatagtggtgatggttgcactactttgtgamtatattaaaaaccactgaaccgtacaccttaaaatgataaattttgtggtgtgggacttacatcttaattacaaaaaaaaaactgtatt

SEQ ID NO: 1941 - DNA, 179 bp, Homo sapiens
gcttgagaagtacatacattttggtaacagacctcttccttccacaggctcatgccaggctttctaaggccatgcgatcaaagcttcatrgtttaagatgtgcagagaattgtggccaggcccgggttccagagcaggggctgcctctgtgtgatcttgggccagtttcttcatctctc

SEQ ID NO: 1942 - DNA, 179 bp, Homo sapiens
gaatgttgcagtcaagtgtctgtcatgtgttgatatccacacagaattaggccctaatgagagccttagaccctcaaccatgcccccttygttggcatcacagggccttatttggaagagcgggcaaagaggatggaaatcataaaatatttcatgggaatcgaacctagggatagtgc

SEQ ID NO: 1943 - DNA, 179 bp, Homo sapiens
cttaaatgtcttgaatgttgcagtcaagtgtctgtcatgtgttgatatccacacagaattaggccctaatgagagccttagaccctcaaycatgcccccttcgttggcatcacagggccttatttggaagagcgggcaaagaggatggaaatcataaaatatttcatgggaatcgaacc

SEQ ID NO: 1944 - DNA, 179 bp, Homo sapiens
gcatgaatactaggagctgagaatcactagaggccatttcaatggaccgtcaccacaccatccacactgctgccagaaggaagtgccgayagagccagcagatgcgtcagggaggccagtctaataaagaggaactgaagaatatgcaggaataggagtggaatgatcagtttcagaga

SEQ ID NO: 1945 - DNA, 179 bp, Homo sapiens
caacggcaataaatggttggcctgtaggtgctccttcctaaagaatacggggtagggggtcaatgggacttagtgacttaacataaaagrggagggcaaaatggagccatggctggccaactctgtgtgaactgcaaggcaaccctaagtgggcagcaaagaagcgccagcatcatcct

SEQ ID NO: 1946 - DNA, 179 bp, Homo sapiens
atcaacagtttctccaaacaacactcactcttaccacatgggatatactgctattttaaattctgatattctttttaaaaaaaaaaaaamaaaaaaaaactggacatagtctgccatttgaaaagctctcgtgtggctggggaaagatgattagcccagtggtgaatggactatccctg

SEQ ID NO: 1947 - DNA, 179 bp, Homo sapiens
gttatcagactgtatagaggtgagaaggctaaactgaggaattatgcctgaaggaagggaagaaatgactgcagtggccttctcagaccytgtaggaaaggactctacctatccagtgaaagtgtctacctagactaagaggtattttagttatctgactcgcatgttgagtaaagcta

SEQ ID NO: 1948 - DNA, 179 bp, Homo sapiens
gtgaaaaaaaaaatcaaaagaagaataaagttttgcgacatatgataattatataaaatccaaatttccatgtccctaaataaagttgtsttggaatacaggcatgtttatttgttctatattgtctatggctgcttctgtaccacaatggcagagttgagtactatgacagagacata

SEQ ID NO: 1949 - DNA, 179 bp, Homo sapiens
cagaaacagaggtgtcccatcccattgcagcctccaccacctgtaaccccttcctggcattggccactgaagggtacaaaggcaaaaggrccacagcaccacttaggtgtagcatggattttaaactgcagtcagtatcagatcctgtttgataaataagctgactgttctctcttgag

SEQ ID NO: 1950 - DNA, 179 bp, Homo sapiens
attatgcaaatcctataccttgatttaaaaaaatctaatagcttggctaacagaatgcatgtctccataattcatttagggaaaggcttsttcctttgttaaatgtcctttggacttttcccttgtgtggggaagggctaatgaaattgtgtcatcagcaatacctgtgattttcttca

SEQ ID NO: 1951 - DNA, 179 bp, Homo sapiens
tttttagaatttctattacatgttgataacaagaaacagacagatttttagtcagatgactttttaaaaattctccgccaaggctgggcrtggtggctcatgcctgtagttccagctctttgggaggctgaagcaggaggatcacctgaggttgggagttcaaggccagtctgaccaac

SEQ ID NO: 1952 - DNA, 179 bp, Homo sapiens
ggaaatattacactgtttatgcaaagtttataaaatgcccaagatatcatatattactcattaaacaaatttatgtaatataaacacaamacctttatttatgtaatataaagataaaaatctcgccaaaaaatacgtgctctaaattcatcacagtggttgtctctgggatggaagga

SEQ ID NO: 1953 - DNA, 179 bp, Homo sapiens
tttcatatgcttggggcaaaaacatgctaatgtttcaatttatatgctcatttattattactattatcactaccattatttgactaagtrgacagggaactaggaaattactttttaaggccactctaaaaccttcctaacatttcaaaccaactttatgccatttcaaaccaaaaatt

SEQ ID NO: 1954 - DNA, 179 bp, Homo sapiens
acttatcacttccccaatcaatacccttgtgatttcctatgcctgtctttactttaatctcttgatcctgtcagctgaggaggatatatygcctcaggaccctgtaataattgcattaactgcacaaattgtacagcatgtgtgtttgagcaatgtgaagtgtgggcaccttgaaaaaa

SEQ ID NO: 1955 - DNA, 179 bp, Homo sapiens
tgctagaggaaacctctggggctcaccaggggccgtgggatgggcttctggggcttcttggagcccaacttcttcatggcattgtagtayttcttctgctcctctgtcatgaagatgtcctggccccctaagtgcagagagggccacactgttactaaagcaagaggaaccccctacgg

SEQ ID NO: 1956 - DNA, 179 bp, Homo sapiens
cccataccttatgcacatttatttacctaaatgctttttaagtacacgccatgttcttttatgtggtcatatgttttcttagaagcttcragagtcagatcctgatagggaccaggtacctctagaattctctccccaacaagattacttcaagaacagaacctacttcaggctgtaga

SEQ ID NO: 1957 - DNA, 179 bp, Homo sapiens
gaaaagctggttaatgccctgggtaacagggcagggcagggactaaggcgagttgagagaatggcctggggtgcagaaggtaaggaagcwctcactctcagtttcatgaaaacctagccctacactagagcctaggcttgctggggattctctgaggaatttggctcagaactgtctct

SEQ ID NO: 1958 - DNA, 179 bp, Homo sapiens
ggctggggttcttcctaggagcatgcccagaggcagcagagctgcgcagccaagggcgggcaccttggctctgaggggcttgtctgggcsactttcctgcgcttggcccaggtcgatgaggctggggctttgatggccaggcagggtgcactgattgggcttggctggtcccacccatg

SEQ ID NO: 1959 - DNA, 179 bp, Homo sapiens
agtggctttatctttcatattttaatgctgagaaaattgcgttagagacacacttttcaagagaaagatcaagcaagatgctgaggcagmcagttctctgcacactgttgggtgtcctggagaaatccatttagaacttactcctggtagaatgtccgcctacaggcttgcagaggctg

SEQ ID NO: 1960 - DNA, 179 bp, Homo sapiens; identical to SEQ ID NO: 1484

SEQ ID NO: 1961 - DNA, 179 bp, Homo sapiens
ttccctatgacaactgggacaagataaggatgcccactttcaccacttctattcaacatagcactcagaagtcctagccagagcaatcasataagagaaagaaataaagagtattcaaattggaaaagaggaagtcaaactattgctatttgccaaggctatgactgtatacttagaaa

SEQ ID NO: 1962 - DNA, 179 bp, Homo sapiens
ctgcacttcggctgtgtgtaatgaaaagagttgggatgagtcagggagagctagagtgggggcagtctctaaagctgtcttcaaggaacrgaaagaggagtggggaaaggatttaggatctatggggtcaactaggtttccttttgtgagtttatataatggttttgttaggatggcaa

SEQ ID NO: 1963 - DNA, 179 bp, Homo sapiens
gcagcgactcctctgctagagactcctggcagggacttggacatggcttcgccactctcaggactctttctcttcatgatatctgattckgatagcaccagtgtcaatttcataaggtaagtcttatccccattttgtggatgagaaaacaggccagcgagacaaagctctgcagtctg

SEQ ID NO: 1964 - DNA, 179 bp, Homo sapiens
cccacccagatccctgcagctgcagcccctgtgggcccctgaggtgggggctgtgggtgtcctgctgggccctggggctgcagtaggcargagggagtgcagggctgaggcaggctgctcactcggagtcggagcttcgcctgacatggttcccatggggacggctgtgggcacatgct

SEQ ID NO: 1965 - DNA, 179 bp, Homo sapiens
cgtcagatgagtaggttgcaaaaattttctcccatcctgtaggtttctgttcactctgatggtggtttcttttgctgctcagaagctctytagtttaatgagatcccatttgtcaattttgacttttgttgccattgcttttggtgttttagacatgaagtccttgcccatgcctatgt

SEQ ID NO: 1966 - DNA, 179 bp, Homo sapiens
aagcactgccttgttaatgtcaggtggagtggatgtcaagtcttcctacttaggctcttttttttttttttttttttaaattcttttatyttttttttttttttttttttttgagactgagtcactctgttgcccaggctggagtgaagtggtgcaatctcagctaactgcaacctcca

SEQ ID NO: 1967 - DNA, 179 bp, Homo sapiens
aagtgctgagattacaggcaagagccaccacacctggccaagcagatttcttgagtaatatcccaaaagcacagacaatcaaagaaaatrgataagtgggatcacgtcaagctaaaaagcttctgcacagcaaaggaaataatcaacaaagtgaagagagaatacatagaacgggaaaa

SEQ ID NO: 1968 - DNA, 179 bp, Homo sapiens
aggtcaccctcaggagtgaggaagccaatgtgcctggccagccacctggtacccaccgctgccagcaaccctatcccctccagtgatgasgctgccttatgcatgggcacccctagagaccaaagatcagcccacctagaggctgtcaccactggagaccctgccccctccagtggcag

SEQ ID NO: 1969 - DNA, 179 bp, Homo sapiens
aaattcgtttttggtttaagatgtggagaaagggtataattgttcctaatagaatcactataggtacttgagataattttttttaattaytatacttcaagttctagggtacatgtgcacaacgtgcaggtttgttacataagtatacatgtgccatgttggtttgttgcacccatcaa

SEQ ID NO: 1970 - DNA, 179 bp, Homo sapiens
ggcttgaccacgaaggaaggcagaggagtagggcaagggctggagtgttgcacttactgaggaggcacctgagcatgtgaaagtgctgcrgggagggcggtggcacagtgggtgtgtgaagaaggaggagtggatcactgatggagccagcagctgaggagttgagggggccaaatcag

SEQ ID NO: 1971 - DNA, 179 bp, Homo sapiens
atttgctttaaagattgtttttttttttttttttttttttttttgaggcagggtttcactctgttccccacgctggagtgcagtggtgcratctcggctcactgcaacctctgcctcccgggttcaagcgattttcctgcctcagccacccgagtagctgggattataggtatgtgtca

SEQ ID NO: 1972 - DNA, 179 bp, Homo sapiens
ttttgtgttacaattatttgttgatgatgataggccgggcgcggttgctcatgcctgtaatcccaacactttgggaggccaaggagggcrtatcacctgaggtcaggagttcaagaccaacctggccaacatggtgaaatcccgtctcaaaatacaaaaattaactgggcatggtggcg

SEQ ID NO: 1973 - DNA, 179 bp, Homo sapiens
gcttggtaccagaagtgtcttggattttggattttttaggattttggaatatttgcatatacataattggatatcttggggatggaaccmagtctaaacatgaaattcatttctgttttatgtacagcttatacacatagcctaaaggtaattttatacaatattttttataatttggg

SEQ ID NO: 1974 - DNA, 179 bp, Homo sapiens
ccataagaaccacaggcattatatgtggtgcctaaacccatacccatacccatgggcacagtggccaagatgattgcccgatgaagcacrgcaaggagtcggaagaggagtcaggatgtcccaggcagtttctcgcagtgagacattctgtcgccagtgccctgaacccagtccctctg

SEQ ID NO: 1975 - DNA, 179 bp, Homo sapiens
tgttgagtccttaatgtctgcaaattttaagaataaagaaggatggcattacggaaatttgagttcctcacagtaactcaactgttctamatatttacagtcattcaattgctctcaccagaggccgtggaatgggtttttgaggttttttggatcctaattttttcattgcattatag

SEQ ID NO: 1976 - DNA, 179 bp, Homo sapiens
atgggcacagtggctcatgcctgtaatcccaacactttgggaggccgaggcaggaggattgcttgagcccagaagttcaagaccagcctyggcaacatagtgagaccttgtctctacagaaaattaaaaaataaaatcaactgggcatggtggtgtgcacctgaagtcccagctactag

SEQ ID NO: 1977 - DNA, 179 bp, Homo sapiens
agctcttctaataatgaaaaaccaggagaacaggaaaaagaagaagatattgctgtgttggcagaggagaaaattgaacttttgtgccargaccaggtaagtggacttgaggactacagccccaatttttccagtgctggtgctcataaagagttacatgcctttgggtggggggcttc

SEQ ID NO: 1978 - DNA, 179 bp, Homo sapiens
gcctggaaaccaggctgatctgtggtgttctgggggtgtccaaagggatcagaatactgtggccatttgtctgtcttctggcattgcatygtgtgggttgcactcctgctgagagctttcctgtcttcatccttagtcctccctatgttcatttgggtgccaggtttccccacagcttc

SEQ ID NO: 1979 - DNA, 179 bp, Homo sapiens
taaagacgctgaaaatggtcatcaaattgccagctctgaagaaggaagaaggcagaaagttcctcaggccctctgtgcagcctagccagygggcatccatcttattggaactggtggaggccctccggctgaatggggagctagtaagaaatgccgtgctctcttccctggggactggg

SEQ ID NO: 1980 - DNA, 179 bp, Homo sapiens
gtgctgatatagttttactattaaacgtttccatttagtacacagtatcactcagtcatcaaatttttatttagaactttcagagggatrtaaaggaagcatcaggcagctgctgccctcagccacaaactatcagcaatgaaacattcattctttaattccttcaaccttaatttgag

SEQ ID NO: 1981 - DNA, 179 bp, Homo sapiens
aaagagatcctggctttcagagagaccctttttaatgctacatccaaacacttccctcacgcaaactgtatgtgattctacagggtctayataactagcgtataagctgtccttttggcctttacagagttactgagaatgaaagaaaggaagacggcctgttactaaagctgcccatg

SEQ ID NO: 1982 - DNA, 179 bp, Homo sapiens
caagaaaaactattttagacagacatccatatgcggcacacaggaaaagcagcctccatatgatccctgccttaaccactaccccagcckgtgtgggacacagagatggtaaacttacaatcacaatgatgaaatcaaggcagcaccaggcactggtgaaatactttccaaatccgaag

SEQ ID NO: 1983 - DNA, 179 bp, Homo sapiens
gagcactccctcaataggtcacttgcacaagaatcctcacttagcttcttctttgagaaaacctgatctaatatggtccctgaggcaagwtgattcctcctatagctccctaaacggtgccctaattgaagtggctagtccagaacagtatccaagaatggacagtctgcaaccttctt

SEQ ID NO: 1984 - DNA, 179 bp, Homo sapiens
ggagcatatggaagagtacttgatacagagaaagcactcaataaatgtgatccactaatactattattagcttttgtgtcatacagctaracacgtgaatcccaatttcaccacttatcagctctatgacctgaaacaaattgataatcctctgagcttcaggtttccttgtatacagt

SEQ ID NO: 1985 - DNA, 179 bp, Homo sapiens
atttttctccttatctaccaaagctacagtccataaacgtgggaacaatgcactcacgttatttgtttagtgaaagacatagaaaatccragaaattgttgtgaattaaaggaaagcaaagagatataacaatcacatgtaatctggggtgctgaattggatcctggattggagtgggg

SEQ ID NO: 1986 - DNA, 179 bp, Homo sapiens
acgtgggaacaatgcactcacgttatttgtttagtgaaagacatagaaaatccgagaaattgttgtgaattaaaggaaagcaaagagatrtaacaatcacatgtaatctggggtgctgaattggatcctggattggagtgggggtaggaggtggatgcataaagggaattaaccataaa

SEQ ID NO: 1987 - DNA, 179 bp, Homo sapiens
ctaatatttcccctaatccaaatagctccttattggggaattaaatgctattttctctcccaatatgcttcttctcaataggacagaacygagtattagaaagctctgttaagtataccaaattaaatcttaacaatatttacagatgctcagtagaggacaattcgagaaggtattgg

SEQ ID NO: 1988 - DNA, 179 bp, Homo sapiens
caaccagtggataaagaaaatgtgatatatatatagagagagaaagagacatatggtgtatatatatggtatatatatggtgtatatacyatatatatggtatatatatggtgtatatactatatatatggtatatatatggtgtatatactatatatatggtgtatatactatatata

SEQ ID NO: 1989 - DNA, 179 bp, Homo sapiens
tatagagagagaaagagacatatggtgtatatatatggtatatatatggtgtatatactatatatatggtatatatatggtgtatatacyatatatatggtatatatatggtgtatatactatatatatggtgtatatactatatatatggtatatatatggtgtatatactatatata

SEQ ID NO: 1990 - DNA, 179 bp, Homo sapiens
tatatggtatatatatggtgtatatactatatatatggtatatatatggtgtatatactatatatatggtatatatatggtgtatatacyatatatatggtatatatatggtgtatatactatatatatggtatatatatggtgtatatactatatatatggtatatatatggtgtata

SEQ ID NO: 1991 - DNA, 179 bp, Homo sapiens
tatatggtatatatatggtgtatatactatatatatggtatatatatggtgtatatactatatatatggtatatatatggtgtatatacyatatatatggtatatatatggtgtatatactatatatatggtatatatatggtgtatataccatatatatatagtctttggtatatact

SEQ ID NO: 1992 - DNA, 179 bp, Homo sapiens
tggggtaagaataggagctgggagaagcctgacacctcctcccctctcttgcactctctgtagggcaaaaaagatattaccccataattrtctggttatccctcaccaatgtcttgatccaacccaagaatcactctaacactgcaaaactcaatccttcctgttattttatttgtggc

SEQ ID NO: 1993 - DNA, 179 bp, Homo sapiens
gccatttagctttggattggcctcaatttgaacaagggaacaaacaaaatcatgatgataacgatgatgacaccagtcgtccttactaargaaagtgctcaaagtccgggtacccggttaggttaggagcagcccccagcgctagatgcagtcctgctgcctcctccatgcactgtctt

SEQ ID NO: 1994 - DNA, 179 bp, Homo sapiens
gtgagctaagatcacaccattgcactccagcctgggcaacaagagcaaaactccatctcaaaaaaagaaaagaaaaaaaattagccaagygtggtgccacatgcctatagtcccagctacttgggaggctgaggtggaaggatcacttgagcccaggaggtcaaggctacagagctatg

SEQ ID NO: 1995 - DNA, 179 bp, Homo sapiens
cttcttgttgctgttattacagctgctgctgcagcaaaacagctttgaaccctgaggtatgaggctgattttggaagctggggcaggggktgggagagattctggtaacacaggatgtgtgaacttatgttcattgaccaggacctgagcaggactgatgaataagggtcttctgtctc

SEQ ID NO: 1996 - DNA, 179 bp, Homo sapiens
ctcttggtgtgggaatatttttttaaggatttggcttaaaaagtcctttattttaaggaattggctcatgtgcgggtacaagtccaaaayctgcagggtaggctgctaggaaacagttgaagtttgtctcccaaagacaatcttatggcaggattctttcctgcttggtctggaacttt

SEQ ID NO: 1997 - DNA, 179 bp, Homo sapiens
agatagcagttggtaattggctctcatccttggtggttggcacagcctagtcacttcatggacctcatgacaatgcaacacatactctcygcaaatgaactttttgggccccacatagggcatcatggcaggattttactgtgctaccaactgcaataggagttttgggggaaaaataa

SEQ ID NO: 1998 - DNA, 179 bp, Homo sapiens
agtgctgactctacaccagtcaagaccctgcctctctcttccttcttgtcctcttcccgccctgtctccatgcctgccccccaccccacwgtaagctgaccagtcccacagcaacagaaatttctgtctagaaagagatgtccatgttcactgtagatgatggtccattgtaatggacc

SEQ ID NO: 1999 - DNA, 179 bp, Homo sapiens
tttaagatttggcctcctatccagcagtagatcattgggaaagaaggtttaattagggctgcctatgacattttacatacacagccttgraacctacgacagaacactaggtatcaccatgaataactggcactaaaggaattaggccacttgcatgggtgctcaatgaatccagagct

SEQ ID NO: 2000 - DNA, 179 bp, Homo sapiens
cacacctggctactgtttttatttttgtagagacaaggtcttgttatgttgcccaggctggtcttgaactcttgggctcaagagatcctkctgtctcgtcctcccaaaatgctgggattacaagccggagccactgaatctaccctaagtatttaattttatatatgggaggcttcact

SEQ ID NO: 2001 - DNA, 179 bp, Homo sapiens
tttagtggtgatttctgagatttaatgcacctgccactggagcagtgtacactgtactcaatatgtagtcttttatccctcaccctctcytaacgtttcccccacacaagtccccaaagtccaagtaccattcttaggcctttgcatcatcatagtttagctccaacttatacgtgaga

SEQ ID NO: 2002 - DNA, 179 bp, Homo sapiens
cgggaggttgtgagtttgtgtgcgcgcacgcccgcagagaagttgtgagcctgtgtgtgcacctaacacagaggttctaagtgtgtgcamttgtatgtgtgtgtgcacacgcggacagagtgattgtaaggatatgtgtgcacctcacagagaggttgtgagattgtaagggtttgcgc

SEQ ID NO: 2003 - DNA, 179 bp, Homo sapiens
tgctgtggttggggctggtgggctctgcctgatccttgggaatatcaagtttactgtcccccaaagcttttcctcactgaagggtcctamcaaaggtgtctttcctgtctgccctatgctgcttagggcctggcccagctttgtgtgaccatcgaggagtgctgggaccatgatgcaga

SEQ ID NO: 2004 - DNA, 179 bp, Homo sapiens
ttctcagtaaactgctggtttatattccttactcattttgtcttgagttgctttaggtctttgaggatgaaggaggtgagcttgtctgtmtgttacacagtagcacttattattggtttgtctttcaccttgctttatagaatgctttaccgtacagaagtcttttttttttttctttt

SEQ ID NO: 2005 - DNA, 179 bp, Homo sapiens
tggttttagagaaatctgcttttctatttgaagaataatttacactgtagtaagtagacaaatggacatgtatgttgatcacagtccccrgtgggctctggtatgtattcatctcttttcacctagagatcacacaagtgtaaaacactaaccagaagctatggggtgtaggagcaaga

SEQ ID NO: 2006 - DNA, 179 bp, Homo sapiens
actttgcgcaggctctcagctgttttggtggtgagatggcagttatcaggtggagctaggactcaggaaaaaagagacaggagaggctcktggggaatgcccttcggggaaatgataaaagaattttcagggatcaacagcatcacctggaagctctttggaaatgcagaaacttgcaa

SEQ ID NO: 2007 - DNA, 179 bp, Homo sapiens
tactacacacctagactatgtggcatagcctattgttcctaggctacaaacttgtacagcatgttactatactgaatactgtaggcaacwgtagcacaatggtaataatttgtgtatacacagaaaaggcactgtaaaaatatagtattataattttatggggccagtatcatatatat

SEQ ID NO: 2008 - DNA, 179 bp, Homo sapiens
cattttcacctttcgcaggcgagacctgggttctgaagcagattttgcagatgatgaaaacagcacagcgggggagagcgagagccaccrcacatcactgctggtgccctggcccctgcgccggaccagtgcccagggacagcccagtcccggaacctcggctcctggccacgccctcc

SEQ ID NO: 2009 - DNA, 179 bp, Homo sapiens
gactgctcggctctgatgccatggctccaggaagccttgatttctccgtgaccagaaggcatcacttcaggccctggggtccctccgtcrgtttggtatctgcccagccctctgcccgtgtgagggtgtccagggccaggcttatatccctctccagctttcaaggcaggatcagataa

SEQ ID NO: 2010 - DNA, 179 bp, Homo sapiens
tcctctccactgaacttgttgatggagggatactcaatgagcctaaggacttttgctcaggttcactcaaatccagttatcttgattgtrtgggtgatttaggaagaaagctgtgcccctacagaggtctgaacctcctatcactccccactccccattgtaatacttcttatcagaat

SEQ ID NO: 2011 - DNA, 179 bp, Homo sapiens
tgcaggtccagctggggccggggagcctcctcctcgggcagcccctctcggctctcctgcaaggtggttgagccgcgggcttgcttctcygccatgcgcttctcgatggctgccagggactcccgtgtgaacctgcggaagctgctggtgccccgaggtaataggaagtttgccatctt

SEQ ID NO: 2012 - DNA, 179 bp, Homo sapiens
ttcacctgggtcaatattgacatggagcgggctgggccttggagataagccaggcaggaacaaagtaggccccaagccctggaaacttgmtgagtgagggggtggtagatgaagggaggctggggcaggaagagggcagggctttgctagcaaggcaaactctgcccagggcccttttg

SEQ ID NO: 2013 - DNA, 179 bp, Homo sapiens
ctgtgggttcagtgcagcctccctgtgggctactgattccccatcttccccagcctgaggctcctctctggacaggaagtcaacaacttscggctatccagatggccgggcaatggcagggcaggtgccgtggccctgcaggccctcaagggctcccaggacagctcagagaatgatct

SEQ ID NO: 2014 - DNA, 179 bp, Homo sapiens
tgcttgtgtttctccaggccaaaaccagcggccaatttggatatcatcaagacacctgaaacttcatcatgagccagatgctgaggaagrgattttgggaggaacccaaggacctcccacttgcagccatgttgagactgacaataagtccacctttcctgcttgtagtgggtcattta

SEQ ID NO: 2015 - DNA, 179 bp, Homo sapiens
aatggagtagcttgctagctgctcttggattagcccacggtcagggatcatacctttgcaacccttggtgctctcagagacgatgaagtkggtgattgattatgtgatattctctagagcctattatatttctataaagtggagtatgtgagagctgcttttattgatttctgtagcag

SEQ ID NO: 2016 - DNA, 179 bp, Homo sapiens
tcctcatatataaaatggggataataataactccataggaggtttctaggagttacagctaatggctgtaaagtggatactctctatgasagggcgattattgttactgtcagcagcatttattatgattgctgagagtggccaagagctccagacccaggcaggggctgccttcagat

SEQ ID NO: 2017 - DNA, 179 bp, Homo sapiens
gaatgcaaacccaggtttgcatgtactctgtgacttatccatgtagccccttttctctcgggatctcagttacgcaaatctagaacagcrcctatctacctcaggggtatggaaggcattaaatgaaaggataataggaaaatactttatacctttattgccctgacattttcttataa

SEQ ID NO: 2018 - DNA, 180 bp, Homo sapiens
ttttttaaagtttcaacaaaaatgaaataccacctgctgataactctaataaaaagaaaaatatataataggtatttgctttaaagattgkttttttttttttttttttttttttttgaggcagggtttcactctgttccccacgctggagtgcagtggtgcaatctcggctcactgcaa

SEQ ID NO: 2019 - DNA, 179 bp, Homo sapiens
ttggtgggactgtaaactagttcaaccattgtggaagacagtgtggcaattcctcaaggatctaaaactagaaataccatttgacccagscatcccattactgggtatatacccaaaggattataaatcatgctgctataaagacacatgcacacatatgtttattgcagcactattca

SEQ ID NO: 2020 - DNA, 179 bp, Homo sapiens
cccatgaaagcatagattttgtctatttgcttagctgttgaaccccaaacactgagaataatgtttagtacattttaggtaatcaacagwtatttgttgaataaataaatattcaagaaatctggatgggtatgtatcagatatttataaaaagagcttttcacctgacaccgaaattg

SEQ ID NO: 2021 - DNA, 179 bp, Homo sapiens
tctttagacatctgatgggagcaacaggacaccggacatatgagtaagctgtctaggaaagatatagcatttgaaatagataagccactragaaagtgtgataagctgtttgtggtgacgaaagtgagaccagacctcactctacatgatcctgcccagtccttcgagacctagtctca

SEQ ID NO: 2022 - DNA, 179 bp, Homo sapiens
ccttatcacatgatctgaaagtgttgtgaaccaaaaaactcaggatggtggattgagtcagctacagaaaccttgagttataataatttwaaaaaaccagagagatagtgtggttttgttgaaatagccactggactcgaagacaggaagcatgagttctgatgctatctgggtctttt

SEQ ID NO: 2023 - DNA, 179 bp, Homo sapiens
ttcagtgttgctgtgcagttctgacattgaaggaatctgtcttttgttcacaagtcacattctgatttggtcctcaaattctgcttctaratggcaaatttggacaaaaatattgtatctccttttaggctaaagcttaaatgtcacttcatcagggaggcctttcttggtcttgtctg

SEQ ID NO: 2024 - DNA, 179 bp, Homo sapiens
attaccagttgtgggactattagaagattacttaactcctgtgtgccttagttttctcatctacaaaataatcgtaataatagaactacrgtccaggcacggtggctcacgcctgtaatcccagcactttgggaggccaaggcagctggctcacttgaggtcagaagttcaagaccagc

SEQ ID NO: 2025 - DNA, 179 bp, Homo sapiens
caactggaatatactggagcaggggaaacagtgaggtgtctgaccagtccctggccagccactgaaccagcgggccaaccaggatgtccygagccccctgccgctcacttggtttacggtggggcaatgagccaggcaaccaatcaatacttcctgagcaccttgatccatggtgactg

SEQ ID NO: 2026 - DNA, 179 bp, Homo sapiens
gctcagtaggtaatgaataaaaatattaacacatcattcttggggagtggtagtactggtgattttttttttaattgaggaatacatacrcaaagtacaccaagttcattcatctgaagtttacagtttgatgctttttaaaaaacatatgcaaacacctgtgtaactacccccaagac

SEQ ID NO: 2027 - DNA, 179 bp, Homo sapiens
aaaaacatatgcaaacacctgtgtaactacccccaagacaaagatgtagaaaacgagaagactctcccatgccccttcccagtggctacmcctctcctgcctggagggaactactgttcgttttctgttgtcagagtcagcacttgctagatgtttctgattctcttcctgtcactgca

SEQ ID NO: 2028 - DNA, 179 bp, Homo sapiens
gggctgctaatatgtgcaaagttttgatggggtatagaagtcaaggagagggagaccctcataaactcacactctggtggggagagagayacatacaggcggcactctaaaatgagacatgcaccatgtaaataaacacaaattaagaagtgaggtgggagcagaggaagagagggaag

SEQ ID NO: 2029 - DNA, 179 bp, Homo sapiens
gtgatggccatgctgctcaacagccattgggaggaaggaagtcccttctctccaggacttaccacctgcagaagggccaggtacccggcycccacgttgtcaaagttgactttcaccttggtccagtacaattctccggtcaagttcaaggactcacactggctcttgttgttcacgat

SEQ ID NO: 2030 - DNA, 179 bp, Homo sapiens
gagaacctgtaacaccagttacaactgcatggttagaacacccccacccccaccccccccccccgcccaatgaagtaccttatgatttckgtagaatgggtccaagtcttccagaggctttcctatgagctcacgaggaatgtcgccatagagcttgggcaacttcctggaggccttta

SEQ ID NO: 2031 - DNA, 179 bp, Homo sapiens
caagtgagagactgtattgtcattaaatatccttctgtagaatctgaaaattcaagattcagctcagaaaacgtaattcttgctggccakccagaaagaaaaaaatgtaaaaagagaaaacgtaatgcaacttcatcaagctgtgcagcttcatgttgagtgtgcagatagatgactgt

SEQ ID NO: 2032 - DNA, 179 bp, Homo sapiens
aattcagatggacaacaaggttgagaaacttttgttttcagatattgtgatgaaaaaagacaagcccaggtatccaagggtattattcarccttcagtgtagcatttatacacgttcagagaggtgacaacaggcaagaccaaagccacctaatctttgtttttaaccccaaatctgta

SEQ ID NO: 2033 - DNA, 179 bp, Homo sapiens
ccagaagaaactccatctgatgtctgttctctagccaagaggctagtgtgtgaagcaagaaatgagaggcaagtctgagatgccaagctytgcaaagacttgcactcgtttgtcctcctcagtgacagtggctcagcttgtctgatgggagccttgctatcattcacgaaactacagaa

SEQ ID NO: 2034 - DNA, 179 bp, Homo sapiens
tatggtatatatatggtgtatatactatatatggtatatatatggtgtatatactatatatatggtatatatatggtgtatatactatayatatggtatatatatggtgtatatactatatatatggtatatatatggtgtatatactatatatatggtatatatatggtgtatatact

SEQ ID NO: 2035 - DNA, 179 bp, Homo sapiens
ttttttactgaagccttctaagaaaaggctggttaccatttgtcaggcaactgaggcaggtgtattcttgtacatcaacctcctgcaagscagggctaaatttgtcataaagaacttccaatccttccgatgaccaaggatcttaggtcattaggatctttccattaggatcacccagg

SEQ ID NO: 2036 - DNA, 179 bp, Homo sapiens
tgtactcttcaagtgagaagtcttctactagttttatcttatttttaaaatctaacttgcatttatcactctgcactgtttttgaaatcwtcatgttgattatattcttatggtttgctccttgtaactgttgaggaatagtacagcatataaatcttcatgttttacggatccattcc

SEQ ID NO: 2037 - DNA, 179 bp, Homo sapiens
tcccaccatactgtactcttcaagtgagaagtcttctactagttttatcttatttttaaaatctaacttgcatttatcactctgcactgkttttgaaatcatcatgttgattatattcttatggtttgctccttgtaactgttgaggaatagtacagcatataaatcttcatgttttac

SEQ ID NO: 2038 - DNA, 179 bp, Homo sapiens
atcacaatggagtcactgcatttttattagctgagaaacaattcatgattctctgaaggtttttctcctcagagtgaaaaacatactgaytgtacttaccacttgcagcagagcgaggtaagcatttcccacattgtcaaagttgactttctggttgatccaagagaaattgccacttt

SEQ ID NO: 2039 - DNA, 179 bp, Homo sapiens
tcattacagtcttgtatggcatgaacatcagattattgacattttaaacctgctagtagtttttgagtaatttgtgatgttaacagtgcyccatgaccaatgaggtcccattgagactatgtgtgctcttcccatcatggtctgttttccttgccctctgggaggtgctgctcttttgc

SEQ ID NO: 2040 - DNA, 179 bp, Homo sapiens
caatggggaaaaatgagtcttttcaacaaatggtgttgggataactgtacagccccatacaaaaggatgaaattggacccttacattgtrtataaagattaaaccaaagtgcatcaaaaaccaaaatgtaagagccagaattataaactcttaaaatattggtataagttctcatgacc

SEQ ID NO: 2041 - DNA, 179 bp, Homo sapiens
tctgccaacttcataccatcaaacctccaactcacctgtgtctgcagccttctttcctccttcccttctcttacaacatgagaggtatcwtcctacattctaaggaccattcctttccctctgcttaggatcttatctcatatctacctcatttttttctctctccttgtctgccagct

SEQ ID NO: 2042 - DNA, 179 bp, Homo sapiens
agtattgttatacaatagttttcattttataaacccactaaaacagttttggggacaccaggggttccaagatcatagttgaggaccacwggcttaaattcatcctgctttctgtcctcaccgccatgctcctcccccaacctcaagatgtctgctctccacctgcaaagagacccaac

SEQ ID NO: 2043 - DNA, 179 bp, Homo sapiens
cataggttgagtggagataaactctctgtgaagactcagtgcctggccgactacagggtcagggagcagcgagtgtggtgagccacaccrctggtactgtccatgcctgggcttggtctggagtggggatcaggcttgggatattcctcctctggcagttttctggagctagatgggta

SEQ ID NO: 2044 - DNA, 179 bp, Homo sapiens
acctcagcctcccgaatagctgggctataggcacatgtcaccacactcggctagttttgaaaaaatttttttgtaggcagtgtaccactrtattgtccaggcccatctcagttcttatcttgatggtcctattggctgttttgacaatttcctccttaaaatactgtatattttggcta

SEQ ID NO: 2045 - DNA, 179 bp, Homo sapiens
ctcctgggctcaagcaattctcccacctcagcctcccgaatagctgggctataggcacatgtcaccacactcggctagttttgaaaaaawttttttgtaggcagtgtaccactatattgtccaggcccatctcagttcttatcttgatggtcctattggctgttttgacaatttcctcc

SEQ ID NO: 2046 - DNA, 179 bp, Homo sapiens
ctcccagtttaaagtctggggattagagggtgacatgacaaaagtagtctcttcagaaaaatcaatcaatgggtgggtgtgagggaaacrgctgcataaaagggaaggaaaagacgtacatcaaggacttctccatgccaggccctgtgcgaggcacattgtccattatatctcttttt

SEQ ID NO: 2047 - DNA, 179 bp, Homo sapiens
tgcatttccccagaggaagtggtgtgtgcaggcaaatctggcaagcctttgggttacagttttgtgatgagccagccggcccacaattamctggaatcccactctcctggttcaaatcctgaccctgctactctcaagctgtgtggcttagggcgagatatttctctaagcctgaattt

SEQ ID NO: 2048 - DNA, 179 bp, Homo sapiens
caggcatgccctctttaggctaacatattttagtggctttgctttttgctttttaaaaagtttttctctttaagagatgtggtctcgccrtgtcatccaggctggagtgcagtggtggaatcatagctcactatagcctcaaacttctgggcttaagcaatcctcctgcctctgccccc

SEQ ID NO: 2049 - DNA, 179 bp, Homo sapiens
ttcttgttaaacacaacagagattccctgggtgatcttgtccacttctctctcccgaatcccaggcctggacacccatctccctcctagstaatccccgacccccatggctggatatcccacagatgcctcagacttagcatgtcccagactgagttctgtctcccttcagacctcctc

SEQ ID NO: 2050 - DNA, 179 bp, Homo sapiens
tcacttctttctaatacctgcctctcttctatgtctttttactgccattagccccaaatagcctgtttctgtgtctgtccacaacctggrtaccataattatgctctttctatttcattccacatacaatcaaacatctagtgctgttgcttctgcctccttaatatcttctcttcata

SEQ ID NO: 2051 - DNA, 179 bp, Homo sapiens
ctgacccttgttcacaagttctttgtcattctgcatttctcttccagttgagacagtaaatgcagaggacagtttggtttctgctgggcrgagaaatgagagtgtggtgggctggctcaaaggcaggaggccagacagagaggctgtgaggatggtggggacaccctggacagtgatgg

SEQ ID NO: 2052 - DNA, 179 bp, Homo sapiens
gataaaggagctggtgaccataggtgggcttgagtgtactcccaggggcaaggctggagaggctgccccagctccaggggccactgaccrcagtagcattagcggcagcccacctgtttcctgtgtgtgtcaggagcgcacattaagaatgctgcagcctccaggtgccagagtctcgt

SEQ ID NO: 2053 - DNA, 179 bp, Homo sapiens
taccagtcctgtcccttattggttgacggttgtcctgggattttaactctacagaacttacttcagtggccagagaaagccctgggcagrcagaggcaggaagtcacatgtaggaagtgtctgctggtgacctctggtctagatccctgggaaatgagcaaggtgcagatagtgacggc

SEQ ID NO: 2054 - DNA, 179 bp, Homo sapiens
gggtcttggtgacggtcacatagcaagttggtgggaaagcagggactgtgaggaaggcagggaggttttctcagcattgaagggagggarcaggaaagtagcttcaggccccagtggctctgagaaaaggctgctgttgggctcatcagagcattcttaagtgtaattgacttttaggc

SEQ ID NO: 2055 - DNA, 179 bp, Homo sapiens
attttagatggttcatgaaattatcgtgggtgatacgtggacgcagcactgaacaacattgaccctaacagtgacccttttcaccttagycagttcagtcatctataacaaattaccctgggctgggtggtttaaacaacagacatgtatttctcacagttcttaaggctgagaagttc

SEQ ID NO: 2056 - DNA, 179 bp, Homo sapiens
ctgggcaagagctggagttttcaggagccccatcctctagccaggcagtgccacactttttggttgaggccaggcaggtgatattggacyaagatgctgaaaatgtaatgacattcacagtggaaaataatgtgctttcctgcttgtgcttattttaaggaaccaaggcatgcttcatc

SEQ ID NO: 2057 - DNA, 179 bp, Homo sapiens
tatttttaggatttgaatatttaaaatttattgagacattttatagtcccatcttggtaaatgttctataagtacttaaaaataatgtgyattttgttcttactgagttctataaaaatcagagcaagttggctgatagttttgttcaagtctcctatacctttttatattttcactca

SEQ ID NO: 2058 - DNA, 179 bp, Homo sapiens
acttcataaaatatgtcaaagtcatcttcacccaaagggtcctcactttcttcagtggctgtattgaagttctctaaaatcacagcaatrtacatgttgacaacaatgagaaaggagatgataatgtaactgacaaagtaggatgtggctatgccagggaggtggcagttttctgagga

SEQ ID NO: 2059 - DNA, 179 bp, Homo sapiens
aactactgaaattaaattttttttaatgaaattgaaaaaaaagatattgagccttttgaatggaaaggcacatcaatgatatctgcatarggggaaaatctttttaaatgcttacattaaaaaaaatacagcctacatgttaaattacctattgcaggccaggcacggtggcttatgcc

SEQ ID NO: 2060 - DNA, 179 bp, Homo sapiens
agaacacttaattccaaatggcagaatacacattcttgtcaggtacacatggaacatttccaggatagacaatacactatgccacaaaayaagcctcaaaaatttaaaagggctgaaattgtacaaagtatgttctctgatcacaatggagtgaaattcgaaattaataacaaatagaa

SEQ ID NO: 2061 - DNA, 179 bp, Homo sapiens
gctgtaacaaattactacaacatttgtggcttaaaacaacacaaatttgttatcttacagttctgaagaacagaagtccaaaatgggccycgctgggctaaaaccaaagtatcagggcctgtgttcttgccagaggcaccaggggaaaatccacttcttgcctttgccagcctctaagg

SEQ ID NO: 2062 - DNA, 179 bp, Homo sapiens
ggctctaagaccaggcaagtattggtctcaacactggacctagttgcactctttcagtcctcaccacaacttgctggcgtataattttcrctttacagatgaggaaattgaggcacaaagagattaattaacctgtaccaagtcccacagattgagcgagagtctgagtggcacaaaat

SEQ ID NO: 2063 - DNA, 179 bp, Homo sapiens
aatcctttctcggtgctctcctcccactcccactggtgatgccctgttcttctgagcttttgtatgtatcacttagtgtctaggcacacmatttattaggtacttaggataaagctatcgtgtgtagagagttaattatattgcactataaccccaacttgatcctgaagatcttgtgc

SEQ ID NO: 2064 - DNA, 179 bp, Homo sapiens; identical to SEQ ID NO: 1432

SEQ ID NO: 2065 - DNA, 179 bp, Homo sapiens
caatgtttggggcctagggagtatttatccagatgaaaagtacttgaccatctcccctgagatgaaggtgggagcaggaagcctagttcrtgtccttggcatcctatctaagcaggcttagtggcttttagttagtttgattgagagactcaacagtccttagatcaggtcagcactgg

SEQ ID NO: 2066 - DNA, 179 bp, Homo sapiens
ggaatggctcttttcactctgtcagatgcacccccccgactctaaccagcatccataagtggtccaagaataaggaggggagttgtgggkgttgaaatgaagttccagtaggtgactttccccatgtgccttccctctctgtgccctaagcttccactctgcctcagatggtgaaggca

SEQ ID NO: 2067 - DNA, 179 bp, Homo sapiens; identical to SEQ ID NO: 1426

SEQ ID NO: 2068 - DNA, 179 bp, Homo sapiens
gattatgccagttatcccaataatgtctttttagccgcttctttttactggtccacaagacttggttattttctattgacactattttcragatcacataatttacatcacataaaacatgactgtgatctaatagaagcctatgcaaagcatagatagggtagacttcattcccattg

SEQ ID NO: 2069 - DNA, 179 bp, Homo sapiens; identical to SEQ ID NO: 1427

SEQ ID NO: 2070 - DNA, 179 bp, Homo sapiens
atagcttgaatctgggagacagaggttgcagcctgggtgacagagtgagactctgtctcaaaagaaaaaaaaaaaaaggaaggaagaagraaaagaaagaaagaaagacagccatagtcaagttcaattccagacaatggcaatgatttatttataaacattgcatattttgtcagaat

SEQ ID NO: 2071 - DNA, 179 bp, Homo sapiens; identical to SEQ ID NO: 1425

SEQ ID NO: 2072 - DNA, 179 bp, Homo sapiens; identical to SEQ ID NO: 1365

SEQ ID NO: 2073 - DNA, 179 bp, Homo sapiens
ccttaatgagattaggaaattctattagcgctcccagctgctgacccgattccatgaggctgaggctccagggctgaacctgcctggttyagtgttcctggaaactagacaccccacccttcagatgggccagggcctccccagctctacctaaagctgtggtctgcccccaggggtgc

SEQ ID NO: 2074 - DNA, 179 bp, Homo sapiens
caaagccatcaaccaactggtaggctgagctgtgtgatggtgcctgctgggtcagtgagagacaaacaaacatgtcttctgaagccacasagaactggtatgttttgttaaaaaaaatatcccacgcaagtaaacacaaacacacacatgtgtatttgttttcttgctatatatcacgg

SEQ ID NO: 2075 - DNA, 179 bp, Homo sapiens
tggtgactgccaataagctccagggcagctggcagcctgagtgctgctgtcccatgcttagcctatgaccatccaccaaggcagccagcrcttttaaaaaatgtgatcacagctttatgtgtttaaaaattgaacaaaaaagatgattgtcttactaataaaagtatcttcttgcttgc

SEQ ID NO: 2076 - DNA, 179 bp, Homo sapiens; identical to SEQ ID NO: 1431

SEQ ID NO: 2077 - DNA, 179 bp, Homo sapiens
tgctgggaactcactaccttactaaaataatgcactaaacattgaaaatggatgagttgttgtctattcggacttagtctcaaaaatctkccattgttgtgtttaggtgagtgagtggcctccagcatctagaagtcgatatttgtctgggagtgtcagtcagagctttgtttcttctc

SEQ ID NO: 2078 - DNA, 179 bp, Homo sapiens
tgcatgcctgtagtcccagctacttcggaggctgaggcaggaggcttgcttgagcccagaggcagaggttgcaatgagctgagattgcgycattgcactccagcctgggtgaaagagcaagaccctgtcaaaaaaaaaattaaattaaaaaaagactttcagaatttaacgacaggttt

SEQ ID NO: 2079 - DNA, 179 bp, Homo sapiens
gtttttaattttgtagttacagagctatcatgctaatatctacataagattaatcattggtagtgttttcacagtttccctgatacaagyctgttatccaaagaattgggaagcctgccttacttcataaagggggcaaggtttatagaatatataaaggaaattaagagtcaaataac

SEQ ID NO: 2080 - DNA, 179 bp, Homo sapiens
agtcctctcaatttttttctacacatttttacacttatcacatcttttctccaacagagcaaaatattttccattggttaagaaacttaygtttcaagaggatagggtagtgattataatcttggatactggagccatactttccatgcttaaatccccactctacaaattaccagttg

SEQ ID NO: 2081 - DNA, 179 bp, Homo sapiens
gtgttagggccagtaaccccaccgaccgctccccattgccactccaggtttgatgggggattggagatggagtgtacaaatgccttggtstggctgtatcaacccgatggcccacttctgcccagctgaggaattgagggcagccttcccaacaacccggggtccttcccagaggactt

SEQ ID NO: 2082 - DNA, 179 bp, Homo sapiens; identical to SEQ ID NO: 1440

SEQ ID NO: 2083 - DNA, 179 bp, Homo sapiens
ggtgttcagataactaatttactgactccgttagcagtgtgtagcttctgtacagtaagtaatcatgtggtagaaattatgaatagtgtrctggttccaagtttatgaattttttagtatgtaagttcatttgttaattagttagttagttagttatggggaaagttcgtgtgatccaa

SEQ ID NO: 2084 - DNA, 179 bp, Homo sapiens
tctgtagcaatggaaaatactttttcatcaatgtagataataaaaaacaaaaactgagcatcattttatgggtatgacatatgtctaccrtgtacccttgactcagccattttttttccagaatgcagtgataagtcagagataactggaattgattgtgatagggttagaaaagggca

SEQ ID NO: 2085 - DNA, 179 bp, Homo sapiens
agagtgtgggttttcatgtagctgctggccctgcccagcctctgaacccggcagacccctcacaggagctctcacctccactttcagggygacaggtctggggctggtgtctctggcctcggtggctggagccatcttgtccctgacaatcatcagccagaccccctccctcctgccca

SEQ ID NO: 2086 - DNA, 179 bp, Homo sapiens; identical to SEQ ID NO: 1371

SEQ ID NO: 2087 - DNA, 179 bp, Homo sapiens
ttaaacataacaatgagctttactaattttttcccctcattctgcttcctgcctcccactacctctcggatttgttttttgttttttttkttttgttttgtttttcttacctgagtacatactttaataattccttcagagaaagtccagagtactgagatttctaaatcattattttt

SEQ ID NO: 2088 - DNA, 179 bp, Homo sapiens
tcacctcagccccagcttctcagccctagcagctgcctaggtgccaggctggagagcccgagctccattgctcagcctcttgcttctcasccctagcagctgcctaggtgccaggctggagagcccgagctccattgctcagcctcttgcttctgacctctctggagtccttctggaaa

SEQ ID NO: 2089 - DNA, 179 bp, Homo sapiens
acgggtgccctctcattgcttttgtctccaatagaagtagaaagatgatatctactaaaaccacagagcttcaaagaagaacagaaaccmcatccaaagattctgtgaactggatgcagaaatactgccacttacctttgggcaaacatctctctggttgctttttgggaaccatctca

SEQ ID NO: 2090 - DNA, 179 bp, Homo sapiens
atgtcataaaaatcattaaccatctctttccttgtggatgttcagaagtcttaccacactattggtatgatgtgatcttttccctcctgmaactaattaccacagggttcatctgaatatacttgcagattgatggttcaggagaagctgccaatattgttgttggtgtttttgttgtt

SEQ ID NO: 2091 - DNA, 179 bp, Homo sapiens
agccacgtggctgggagccctgcatcttcaggccatcctccaccttcctggtcaagcctcccatctgttctaccttcctctccaagtgcrctctgcaggccttgggggttgagccagatgttcagctttttcctgggtgggctgctctggtcactgtgttgggggcctggggtcagcaa

SEQ ID NO: 2092 - DNA, 179 bp, Homo sapiens
ccacaggttgagtagatcaaagaatgtcagcactgggaaagaccacagagctcatctcattggctttcttgtttcacagatgagaatcasagggtcagaaaggggaaaggacttgcctaaggtcacacagtaagtccatgccagggcaggaacagattctgagacccaggtctcccatt

SEQ ID NO: 2093 - DNA, 179 bp, Homo sapiens
ggtttcaatgagctgaaatcacgccattgcactccagcctgggcaacaagagtgaaactccgtttcaaaaaaaaaaaaaaattagctggktgcggtggtgtgcgcctgtaatcccagctacatgggaggctgaggcagaagaatcagttgaaccagggaggtggaggttgcagtgaccg

SEQ ID NO: 2094 - DNA, 179 bp, Homo sapiens
tgaggtgacttcatagtaacaggcacaagctcagagcttcttggggacaaaagcccaggagtccctcttcttgtccaccttgcatttctrctcttccccagagaagctacaatgggtcaagcgactaccactgtcaggacagggttcctgccaagtccatgtgcagttgcttctggctg

SEQ ID NO: 2095 - DNA, 179 bp, Homo sapiens
gggtttcaccatgttggccaggctggtctccaactcctgacctcaagtgatctgcccgcctcagcatcccaaagtgctaggattacaagmgtgtgccactgcgcctggcccgccatttattaatttagcaaaaaagccatagaacaatgttaggataatttaattttttataatatata

SEQ ID NO: 2096 - DNA, 179 bp, Homo sapiens
gcctggtttcaggcctggcgccgggctgcctgtctttggctttacttccttgttgtttcttctaaaacaggtactgagtataaaacagtrtaaaacaatatgagagggtctctctcttccctcaatacagggctctgagcaaaatctgccattctgtactaggatctccccagacattg

SEQ ID NO: 2097 - DNA, 179 bp, Homo sapiens
atttgtgcaacaattggaaactttaacactaaattttcgatgaagttaaggaattactgttattttttaagtgtgataatgatattatgyttacaaatttttaatttttaaaaagtgataagggtattgtggttatgctttttaaaaggagtccttacattttagagatactgactgga

SEQ ID NO: 2098 - DNA, 179 bp, Homo sapiens
taattcagctgacaggaaaaccccacccgctttagctctgctgctctgctgaagtgattccccaggcagggatgaaatgaaatgggggtscctgagaccgggtcctcctccagaggtgggagctgaggaagagtgggctcttcggcctgagccctgaattttgcccacctcccaaggac

SEQ ID NO: 2099 - DNA, 179 bp, Homo sapiens
ttatcaaagatatttttaaacacaatatttggttttagcatggagtggtaggagggaggatagagaatgtaaataagttgctggtaacartgttaattgatgacacctttctggaggaaaatttggcaatatcatcttaaagccttaaaaatatccctatttgttgatgcaggcagttc

SEQ ID NO: 2100 - DNA, 179 bp, Homo sapiens
acttgcaacagtttccatttcattttaaactccagcctatatcacatatcagacctaagatgtgtctttctctctctagtggagtgttamattttgtcaaatttttgtttgtttgagagggagtctctctctgtcgcccaggctggagtgcagtggcgcaatcttggctcactgcaacc

SEQ ID NO: 2101 - DNA, 179 bp, Homo sapiens
atctcctgtgagctgctggaatcggacttcctcaaatgcagcgtgggatttcctttcatgaggtcaaagtcaaaggtaagggacacagaygggacccttcctcagcagcaggcccccagcccttccaccagccactgattccgccgcctccctgaggtgaggagtcctcccaccccctg

SEQ ID NO: 2102 - DNA, 179 bp, Homo sapiens
tggcaagaatggttgcaacgaaactgcaggattctttctgaaaagacccaggaagggattggccccaggagatcaactgggaaatcctcytgccactgaattaacaggctgggtggaagagcccttggaaatcaccaattctgatttcactctcattttatggaaaagcgactgagtct

SEQ ID NO: 2103 - DNA, 179 bp, Homo sapiens
ttcaggataccttgcctgttttctttctttatgcctaatcatttgcctacccttcattttgaaggtggttagcaggtggttgtttagtgrtcagttctacattctttctctaggtctcgataatgtttagaggaataagtataaatattccttgattttcttagtggtataattgcgga

SEQ ID NO: 2104 - DNA, 179 bp, Homo sapiens
agccaggaaggtgcttgctgtttgggtttgaccaagtgtcactttttaataatctgccactcttggcagggagctcactcagtgggtttratgtggtggatgctggctcgggaagttctgcgcatgcgtggcaccatttcccgtgaacacccatgggaggtcatgcctgatctgtactt

SEQ ID NO: 2105 - DNA, 179 bp, Homo sapiens
aaggacccaggcatggccacctccattcccaggaaggatgcccactggatccttcccccacagcctcactcacaccaggccctgcatccyccaacctccaggagtcctgggcctaggctgggagtagggcgggtggtgtgggtacctgggcagccatgcccacccacagagtctagggc

SEQ ID NO: 2106 - DNA, 179 bp, Homo sapiens
cctgagccaaagcttggcccagggcaatgacttttcctgggatctggggctgcctctgtggtgatactgtcttgcccaggctccaggttsgggagctaggaaaggctcaggcagacggtgtatcctctcctgcccgaagccaccttccttcctgtgacacccagcctcaggacactgct

SEQ ID NO: 2107 - DNA, 179 bp, Homo sapiens
tttggacaagataagcattaaatgtcgggctgtcccagtcagagctggctttctggggaccaggcaatcagatgtggagctcaagagagwagactgggctggcaagtgtttgtgtgcagatggggattgaggctgtgaggggagcagcactcgcaggggtctgtgaagagaagcgggct

SEQ ID NO: 2108 - DNA, 179 bp, Homo sapiens
gcatatttggggtaaaaggactttcaaggggcaggaaggtggtgggaggaagcgtggcgaggaaagttgcagtgcaaattttagagtggraggcagaaagttattatggggggaaaagaattgctacagggtctgaggtgaggtgctgaagccattcccaggctggattgtgtcacaga

SEQ ID NO: 2109 - DNA, 179 bp, Homo sapiens
tagtatgaattcagcgtgatctttgatacaagccacctgtctggggaagaggaagttctcagcttcattgttactgctcagaggtaaggsgggggtttaaacacttttttcaaagatgagagatttatgggaccaggaaaggatgtgtcctggttaagctttgatgaatcccaggatgc

SEQ ID NO: 2110 - DNA, 179 bp, Homo sapiens
aggaaaggatgtgtcctggttaagctttgatgaatcccaggatgctgaggaggaagaaatggttactcagtgataaagccttgagccgcwaagtggaattggatttcttggggatggtggttgcctagtgctgcttgcatagccgccactgcagattgaactgagaggaactgggcatc

SEQ ID NO: 2111 - DNA, 179 bp, Homo sapiens
gtagccaagtgtgatttggaagagaaatattagaaactaaaagatcccttagtaaatgaacattgaggagatatatatatatatatatayacacacatatatatacatatatatatacgcatatatatatatatataaaatctcccaaaataaagctagatttatttacaggttgcaaa

SEQ ID NO: 2112 - DNA, 179 bp, Homo sapiens
ttgttaaccatgtgaaagttgcagaaatcatgcctcttgattcataaatacttcagtgtgcattcccaagaatgaggctgttctcttaakaaactgtagtatagttatcacattcaggaaattgaacattgacactatgctattagctaatccgcagtttatgttctgattatgccagt

SEQ ID NO: 2113 - DNA, 179 bp, Homo sapiens
cctatctcactaaaatgcttccttgcagggatacaagagattgccttgtggctaaagtcagggggcccttctcagttcttgtcttttttktttttttctttttctttttctttttttttttttgagacagggtatcactgtcacccggactagagtgcagtggtgcaatctctgctcac

SEQ ID NO: 2114 - DNA, 179 bp, Homo sapiens
ggccaaaggcgactcccctgtggatgggttaacaccatcctggcccactcccgcccccaccccagcatcctgccaggtcttgccctgccrtttgtttggccggctcaggcccaaccgtctcatctgtcatcgtgtgactgctccagaatgagctaagttgaagagttgagataaagacg

SEQ ID NO: 2115 - DNA, 179 bp, Homo sapiens
tgtttttaccagttggacacaaaataaaaatgtttttcatccacctgtctagatgccttgaaatgttagtctgagctgagatgtgagtcytggaaattggaggacctctgtaccttctcttccaaaatctgtaaacatactgtttccgcttggcagtcttgatttgctttcagtgactc

SEQ ID NO: 2116 - DNA, 179 bp, Homo sapiens
ataataagatatgtataattggataatttaagtagatatattatggtaaatgctcacatgtttttaccagttggacacaaaataaaaatrtttttcatccacctgtctagatgccttgaaatgttagtctgagctgagatgtgagtcctggaaattggaggacctctgtaccttctctt

SEQ ID NO: 2117 - DNA, 179 bp, Homo sapiens
tatgcctcagggagataacgaatggtgactctaatcaatatccgtataagtaaaaggagagggtaatccattggacccatccatctcccmacacacttcatctgatgtcaatctcagtggcaataccattcattcattcactcattcacttactcaacaaatcctattgcatacctgta

SEQ ID NO: 2118 - DNA, 179 bp, Homo sapiens
ggggtttctttttacagtgataaaaatgtctggaattagatagtggtgatggttgcactactttgtgaatatattaaaaaccactgaacygtacaccttaaaatgataaattttgtggtgtgggacttacatcttaattacaaaaaaaaaactgtattaaaattacatggaactctaga

SEQ ID NO: 2119 - DNA, 179 bp, Homo sapiens
acagactgcatggaagagagatctctcttcctcttctaagataaccaatcctatcagattagggcctcaaccttaaggcctcatttaacyttaactacctcctgaaggcctcatttccaagtcctgttacactggggtttaggcttccatctacgaattttggcaggacacaattcagt

SEQ ID NO: 2120 - DNA, 179 bp, Homo sapiens
aataagcatttttcattacagtctccttttcttttcttttttttttgagatggagtcttgctctgtcaccaggccagagtgcagtggcaygatctcagctcactgcaacctccacctcctaggttcaagcaattctcctgcctcagcctccctagtatctgggattacagatgcccgcc

SEQ ID NO: 2121 - DNA, 179 bp, Homo sapiens
ttgaactcttgagctcaagcaatctgctcaccttggcctcccaaagtgttggaattacaggtgtgagccaccgcactcagccttcaaaaygcctttgatggttgagcctctgatcacgacttctgcagatgtcccatcagaacccagcatctgttcactgatacttccagggtggagtg

SEQ ID NO: 2122 - DNA, 179 bp, Homo sapiens
caactcacactcattttgcatttctccaaaaacttaggaaagagcttggaaaagtactgaggctaaagcgttggacggcagaaatattgrcaaaggcatataaaactctgtccacattagtaagtaggattaatatatggattaatcctaccgctgagtattatttggcttaatatgta

SEQ ID NO: 2123 - DNA, 179 bp, Homo sapiens
tttttcaaatgccctgagggcagttttcttggctgtcctgttcactgtctgacacacagtgcccatcgcagattaagcacgagtagtggsggggtaagcacttggggagggtttgtctagtgacagtagggctaagcccatgtccatgtctgtgcttcttacatccctctttcctgtgg

SEQ ID NO: 2124 - DNA, 179 bp, Homo sapiens
gaccaacatgttcagagctgctagtatctgcctccttctggctcttcaacattgcattcaatctaaagagctccccctaccttcccatarttgttattttagtttaaataagaaagagctggtttctgttgtttgcaacccaagaaccctaaatccaatatggcaccttagtggtgagg

SEQ ID NO: 2125 - DNA, 179 bp, Homo sapiens
atccagccacactggagatggcggccggaggcgggcccgaggtggggcgtgaccagcgcagtgacgtcagcgcgctgcgtgtcggcaggkggaggaagaggggaaagtttggcccgtgcgtggggctggggtggagggcgggacagaggggctgggcccaggcaaagcttctgtcgctg

SEQ ID NO: 2126 - DNA, 179 bp, Homo sapiens; identical to SEQ ID NO: 1408

SEQ ID NO: 2127 - DNA, 179 bp, Homo sapiens
cggatgtaggcttcagtgctgctgggcccggctagctggtcctccagcaggtaggtgttgtgtgaagaggacaccaggtagtggctaagyggctggcccatgtcctggtagacacggcggtgtgccaggctgaaggcgctgccgtcagccgacagtaagtacatgaggaagccgtcctt

SEQ ID NO: 2128 - DNA, 179 bp, Homo sapiens
tttccagccttctcctgacaactcccattcaacccctcgtcctaggagatcatctctacaaatcagttgggctcctattggccctccagscagcccccgtgggcaaatccttttaagacatctctctccatctcaatgtacctgggaccgagtattctctattcaaatttccatctcac

SEQ ID NO: 2129 - DNA, 179 bp, Homo sapiens
cctccccttgtacaaattctgctgatccttattcatgatgattataacattctgctcctttcctcatcttcttaaaccactatgggctcycttcactctgcctcttttcttcttccaaaaacatcagtaggttcatcttcctaaaagactacacttttttcctggcttttatcccactc

SEQ ID NO: 2130 - DNA, 179 bp, Homo sapiens
gaaggtccctgcaagtgggtggggaggaggacggaccaagggggtgtggtggggagggatatttggagccaatatcagagcccgacagaygtcatttcttctgggatcctcagtagcttagcttctagaatgttctgaagaatcagaagagggtttctcaaactttcatgtgcccaaga

SEQ ID NO: 2131 - DNA, 179 bp, Homo sapiens
gcccctgaatgtccctgggaggtgccggaaacgcccttgtcttgggctgtttacacaggaggctgacacagaggagccccaggtagagasagggagcttgggtttctgcacattctaccatgggcacaatgaggcagggagggctagattaactagccacattctccaatggttcttag

SEQ ID NO: 2132 - DNA, 179 bp, Homo sapiens
caaaccaaaaagttctgatgacatttgcagtaagagaaatgtctactctttgtcattcaaagagttcaatttgttcattcttcaaatttkgagcacaattctcaacaacactctagggttgttttgtgtgcattgggtccatcattttgtgcctgtaagaaataacaacaaaaatcttt

SEQ ID NO: 2133 - DNA, 179 bp, Homo sapiens
gtatcttgttaagagtaaataatactaacaagtgatggaggaaaatttaaagcagcatgatgtctaaactagatgccaaagaaaagttcygacttcctgatgcttttgttacaacagcaaccttgtttccatgtttcctcccttccactgtcttccccttccctccccaactctttttc

SEQ ID NO: 2134 - DNA, 179 bp, Homo sapiens
aagattgagatgaacttcctactttatacaaagctttccattcataatccaacatgtagtgccatcatctgccactgaatccaacgccarctctgacagttacagtttccagacagagtgtcttacataaaccccccatttactggggtcagaaacatctctcaggtacaacccaaaat

SEQ ID NO: 2135 - DNA, 179 bp, Homo sapiens
taaaaatatatggcccttcagattttgtacttctttttgtgtcagtgttaataatacgtatctttcaaagaatatccccctttttttttkgtagagatagggttttgccatgttgttggtagcaagccctaaccctgtcataaacaggccttaaataaactggccataaacaggatttc

SEQ ID NO: 2136 - DNA, 179 bp, Homo sapiens
gtctgaggcagtcaccctggtgggaagatggaagcgtggaggtggcagtcagagtgcgctgagcaagggcttttgtgtgtttgaccctcrgagaagcagagctaaaattaggtcttccagctgtgtgcaggtgtgaagccccacccccttacctacccccaaccaggatctcagaatta

SEQ ID NO: 2137 - DNA, 179 bp, Homo sapiens; identical to SEQ ID NO: 1409

SEQ ID NO: 2138 - DNA, 179 bp, Homo sapiens
acacccttctccccacctcattccagcaggagcaagaagaggaccatccccaacagggaaggtgagatgggacctggagcctgagtggcycctcaatcccctggcacccggccccaccctacccagcccagtggggagctggtgctctacgtatctttttcttctgttggttgaagttg

SEQ ID NO: 2139 - DNA, 179 bp, Homo sapiens
gcttctcccaaggccagtctttttttgtttaattgtggttaaaagaaaaatatatgtgtgtgtgtgtgtgtgtgtgtgtgtgtgtgtgtrtgtgtgtatgtgtatatatatatatatatatataaaaaatgaaatctaccctcttaagtttttaagtgaacagtacagtcttatctata

SEQ ID NO: 2140 - DNA, 179 bp, Homo sapiens
aggttgcagtgagctgagatggcatcactgcactccaggctgggtgacaagagtgagactctgtctcaaaaaaaaaaagtatatatatayacatatatatatttatatatacacatatatatttatatatacacatatatatttatatatatacatatatatttatatatatatttata

SEQ ID NO: 2141 - DNA, 179 bp, Homo sapiens; identical to SEQ ID NO: 1522

SEQ ID NO: 2142 - DNA, 179 bp, Homo sapiens
atacttgcagattgatggttcaggagaagctgccaatattgttgttggtgtttttgttgttgttgttgttggggttttgctctgtctccygggctggagggcagtggcattatcatagctcactgaagtctcgaatccttgggcttaagtgatacccctcctcagtctcctaagcagct

SEQ ID NO: 2143 - DNA, 179 bp, Homo sapiens
gcacagcaagaatatacccagaaccaagccctatccttggggacaaagagaaaacattctccccaccacccccagacacttgatcatgtratcagtccttagaggaccttgttgggaggtgttaacagcccctgatgaagccatcagttaaacaaatgagtcaacctctgatctctcca

SEQ ID NO: 2144 - DNA, 179 bp, Homo sapiens
ttggccttttggggaagttctcctggataatatcctaaagagtgttttccaacttggttctattttccctgtcactttcaggtacaccartcaaacatagatttggtcttttcacatagtcccatatttattggaggctttgttcatttccttttactcttttttctttaaacttgttt

SEQ ID NO: 2145 - DNA, 179 bp, Homo sapiens
ctgcgggaccaagccgggaatgagcttgtgtgccctgatacccctgagggtggctgcctcctctggtccccaggcccctccagttcatcrgaattcagccatgaaactgactcatcagtgagcaggggtggaggggcggggcaggctggccactgagggccactgaggtgtggccagta

SEQ ID NO: 2146 - DNA, 179 bp, Homo sapiens
ttcctccaacccttcctctaggacatggttttaagtctctgccctgtcatctgatctgcagcaatgacttgtttctcgtccagacacctyatctccttccctagcctcttctcttcctcctcctctcctctgggtagccctgaagccactcctggaggggcccttggatctctgaagga

SEQ ID NO: 2147 - DNA, 179 bp, Homo sapiens
acactcacccacatgcttgggctgaatgagagttccaactgccctaatgagctgtatgatctgaggcaagttacttcacttctcatgtcrgtttcttctataaattggggataattccagctaccttgtggctagatcacatgaaataacatatgtaaaggacttagcacagtgtctgg

SEQ ID NO: 2148 - DNA, 179 bp, Homo sapiens
agaagtccacgtgaaggctgggctaatgctcctggatattcatttacgaccttcctctatggccccaagagtagtcctaggaagcccacwgatccccaacgggagcaagacttctaacggctgattggtatggaccgagattatctttcaattgaagtgactaatcgagatgtaatata

SEQ ID NO: 2149 - DNA, 179 bp, Homo sapiens
gtctgtgctgcatctgacccagcacagtggtgaggctgtcgctgcaaatggccggctgagctcccgtgtcttcttctgaccacgtctatragcagaacatgaggaacagaggctggggtgggtggtctctggccctcagcctccttgtaccccacaccagctggtgtcccttgagtgga

SEQ ID NO: 2150 - DNA, 179 bp, Homo sapiens
aacgatgattttgttttgttttgttttgagatggagtttcgctctttttgcccaggctggagtgcaatggcgcgatctcggctcactgcracctccacctcccggttcaagtgattctcctgcctcagcctcctgaataactgggattacaggcgcacaccaccatgcccagctaattt

SEQ ID NO: 2151 - DNA, 179 bp, Homo sapiens
ctggtttgggaaggtacccacagcactgaccacttgattcatgcccagatgtagtggtgccaggctgggggtgggtcctctccacagggsatgcagactttgagtccagcctcagataggccgatggggggaatggggaggggaagaagccacagggtcccctctagaacttggggaaa

SEQ ID NO: 2152 - DNA, 179 bp, Homo sapiens
cacaaagtcagggacaggatccctcctggtaggcagtggacaggcaggcagagacagggcctgagccaggggtcctggctgcccggtaaktgccactgttaggtggcctgtagtcaagtcagccacttttgtgaaagacagggctctggctgctctggtctggaggtcggctccccagg

SEQ ID NO: 2153 - DNA, 179 bp, Homo sapiens
ttcacacagagagctggcaagacgagactagaaccaaggactctcagtttcccactcacagaggctcccacaagtacagcccacgcttcrctcccaggcctgggtaacttgcgtctctcagatgctggggagagtgggggcagtggcgacctctgctggcagcatcccctccctgcatt

SEQ ID NO: 2154 - DNA, 179 bp, Homo sapiens
gagggtgggtgactgggattcacacagagagctggcaagacgagactagaaccaaggactctcagtttcccactcacagaggctcccacragtacagcccacgcttcgctcccaggcctgggtaacttgcgtctctcagatgctggggagagtgggggcagtggcgacctctgctggca

SEQ ID NO: 2155 - DNA, 179 bp, Homo sapiens
tgtttctgtttgtgtaactgggtgtgtgtgtatctagccatctgcctctgtacacagggctgtgggtgagtctgaccctgtcactgagcmattgcattgcggtgcatatgagaccatggatgagtgtgcatcaccaggtggcagcagtgagactccgggagattaggagtgtgttggaa

SEQ ID NO: 2156 - DNA, 179 bp, Homo sapiens
tcctcccatcccagggagggcgagactccagctcaggccctcccctacccctgcagccctctcctagggaaattcatggggcaccttgcrtcacagctgggtggggcgagagctttctccatgagcagagagggaccctgtacccagagcagagcggagtgctcggggagaaaccacgg

SEQ ID NO: 2157 - DNA, 179 bp, Homo sapiens
tcttactatgttgcttaggctggtcttgaactcctgggctcaagccaccctcctgccttagcctcccaaagtgctgaaattacaggcgcragccaccatgcctggtggcttttaatatttctgagtcgcattgttttaggtttgtcatttgaaagcacatggctgaaggtttttttttt

SEQ ID NO: 2158 - DNA, 179 bp, Homo sapiens
tcctcctctcctctgggtagccctgaagccactcctggaggggcccttggatctctgaaggaaggccaggtgggctacactgaataacamcctaactactacccctcaacctcacccccaccccaggaaaagtaagtctttttctaacgatccaccagattagggttacatttaacagt

SEQ ID NO: 2159 - DNA, 179 bp, Homo sapiens
ctgacctgggccaatggaatgaggaggcactgccctggctggggattgccagtgtgtgcgagagacctggtcttgtcctcaggcccctcmtgtgtcccattggtgcccccttctcctgccctggccctgatacttgccccgattcttgctccagagccacccgtcccacaaggaagtgg

SEQ ID NO: 2160 - DNA, 179 bp, Homo sapiens
cgcaccactacactccagcctgggcaacagagactccgtctcaaataaataaataaataaataaataaataaatatcctcctgaaccccrtcggtctctctgattccttatcaatccggctacagtaggatctccatctgataccaacaaaattagagtaaggtgtcagaagtgtgggg

SEQ ID NO: 2161 - DNA, 179 bp, Homo sapiens
gcccgtcagtaggaccccacccaactccctagcagcctgtcctgcctttctggtaacacggtgctgcctctgtgccctgcgggcttcggscacccctcttttagccctggtggctcactgaacggcaatgtccatctgtctcccatcacaaggcagcgcttcaagtaccagagctgtgc

SEQ ID NO: 2162 - DNA, 179 bp, Homo sapiens
tatcagatatcagaaaactaacattacatctggaacatctagaaaccctaggaaaacacacacacacacacacacacacacacacacacmcacacaccccactaccaaaaccactccaaggtaactgctgctaacattgtgaggcatattcttccaggacatagaggaaaaaaaaccca

SEQ ID NO: 2163 - DNA, 179 bp, Homo sapiens
ttcattcaagagctccaaggcttccctttccgcccggcttctgttgccctggcctgagcagcgagcagctgggaggggactgaactgccyctaaccagggttgtggctggtggggttgggactagggctgggcatgtggctgggattgggcccatctcccaagtgtggtgggtttcagg

SEQ ID NO: 2164 - DNA, 179 bp, Homo sapiens
agggtgatgcataataaagacacactgggcctgggacccacagcgatacacagctacacagatatggccacacaaatacacagtcacacmctagaccaccactcacacaacctcaaagagacaatgagccacacacaatgacacactgccccccaaaattacacactgtcacagggagt

SEQ ID NO: 2165 - DNA, 179 bp, Homo sapiens
agatagggtctcactctattgcccagtctggagtatagtggcgtgatcttggctcactgcaacctccacctcccaggttcaagcaattcycctgcttcagcctcctgagtagccagaactacaggtgcatgccaccacatccagctaatttttgtatttttagtagagacaggctttca

SEQ ID NO: 2166 - DNA, 179 bp, Homo sapiens
tgtaaggctgtccttggcttctgctctgagcagaacatcaggccatagctatgtcttctgtccccaccaagcccctggtgacagcatcaragagggcagcctctaccctggtgcatccccgttcacagcctctgccccaggcacaaggaaaagtccccagtgtctgggcaggcctgagc

SEQ ID NO: 2167 - DNA, 179 bp, Homo sapiens
tggtctaattaacttccttgtgtaattgctttcggctactctcctagcaggcaacaggaaaatgccacaagtcacccacttatggtggaytctcgggaaaaagtgtccattttcaatgccagctgctccagactgatcttatcattcctgcatcgttttctccagagaatctttagcaa

SEQ ID NO: 2168 - DNA, 179 bp, Homo sapiens
aaaagaactatgtaagcctctaggccaaaagacctagtctcttacaaaggaaagacctggttggcctcaaacttctcaacaaagcaagayagcaatggggcaaccttttcaagaaactcaaagtatgaactgaggatttcatatttcaccaagctgtcctttaagtatcaaggatatag

SEQ ID NO: 2169 - DNA, 179 bp, Homo sapiens
aggtattcactgtcaccataagcacacttcttcacatgtgatgtccccatatacatacatgtgtatatgcacacacacaaaagataaacrgatacaccccacctgtatacatgtgtacatgtatacatgtacagcaacagacatgcactgagtgagaagtgtcataagtcatgtacacc

SEQ ID NO: 2170 - DNA, 179 bp, Homo sapiens
cctcatttacttttctttttttttttttttaattttttgagatggagtctcactctgttgcccaggcttgagtgcagcgggacgatctcrgctcactgcaacccccacctcgtgggttcaaacgatcctcctgcctcagcctcctgagtagctgggattatagatgcaagccaccacac

SEQ ID NO: 2171 - DNA, 179 bp, Homo sapiens
agatacttttgtagggcatatgaggttttgaagccagggtcattcttttgtctgtatgatgtggatctcaactctttttttttttttttyttttttttgagacagagtcttgctctgtcacccaggctggagtgcagtggtgcaatcttggctcactgcaacccccggctcccaggttc

SEQ ID NO: 2172 - DNA, 179 bp, Homo sapiens; identical to SEQ ID NO: 1446

SEQ ID NO: 2173 - DNA, 179 bp, Homo sapiens
aaaactcacagactaggagaaaatatttttaaatcatatatctgataagagactatgatccagaatatgtaaagaactcttacaactcarcaagaaaaagagaaataacccaattaaaaatgagctaaggatctgaatagagatttctccaaggaagatatataaatgaccaacatgca

SEQ ID NO: 2174 - DNA, 179 bp, Homo sapiens
cattttgtgctgtttgaatttttaaagccatatatacatattactcactcaaatcctgttttataagttttagtctttcataagtgaagrgacaataatccattctcagcagagcctgcactttgagtgactacttttcctgatcaatgccccagataatcaatccatgtttccctttt

SEQ ID NO: 2175 - DNA, 179 bp, Homo sapiens
aaatataggaaattgctatttgatcatttccatttcatacagttgaacctatatatgcatatagcatatacatgaacacatgcacacaarcatatgcgcagatgcagaaacacacaccaccctcatgtatgtccacctatagatggacatgtgtgaatatccatgttcacctacacaca

SEQ ID NO: 2176 - DNA, 179 bp, Homo sapiens
cttcaggcaactctggctgtgcctctggccttccttctgttcctctgaagacatcctgctgccagtgtccccatgctctcagaagacacrggaagccctgggcagggcctcagctctccccacaggaagcttctgcaccctacccgaaaccactcagggggcccaccaaggccaggagg

SEQ ID NO: 2177 - DNA, 179 bp, Homo sapiens
tttactgacttttaccccaggaggatggggtggaagcaacagagacacaaatcaagcttcttctttgtccagcaccccacccgatcacaytgacagcccagtgaagactgacagaggtccccatgtactccagcctcccattggcccagggccggagccaggcactgatactctgccag

SEQ ID NO: 2178 - DNA, 179 bp, Homo sapiens
ctgttgtcatcctatcattgacctgactgagataccagagatcgccaaactcgcgggctccagttatggcatcacttctctcatttgggrttaatgtcggatttagcagtaacattatatctctccatgtcagatcaaaggattgtcctaacccttgtaaaacatcaatatagccatct

SEQ ID NO: 2179 - DNA, 179 bp, Homo sapiens
tgggttcaatcagctctcctggctcagcctcctgagtagctgggattacaggctcccaccaccacgcccggctaatttttttttttcttytttttgagacggagtttcgctcttgttgcccaggctggattgcaatagtgcaatctcggctcaccacaacctctgcctcccgggttcaa

SEQ ID NO: 2180 - DNA, 179 bp, Homo sapiens
atcatttcccttttgtggaacaaagacaaaggcctggacacatgccctctgtgagcccttcctgctctggcctccatacgtgccgtgggkttgagagtttgtgagctgttccctgctctgggggtctggagagcacattttcagcagaggctctgccccagtttctgacctgactttcc

SEQ ID NO: 2181 - DNA, 179 bp, Homo sapiens
tcattttcttatgtctgggcctgctgatcttcctctggcctcgccactttagggacacaggatcatcatggtggggacatcccactgacytatgctgccacctgcacatgcgaggtgttcattgcctttgagggctctctccagccctactgtttccaggggctctaagcagggcccag

SEQ ID NO: 2182 - DNA, 179 bp, Homo sapiens
ggaggctcttcctcagattcaggcccctgaatgtccctgggaggtgccggaaacgcccttgtcttgggctgtttacacaggaggctgacrcagaggagccccaggtagagacagggagcttgggtttctgcacattctaccatgggcacaatgaggcagggagggctagattaactagc

SEQ ID NO: 2183 - DNA, 179 bp, Homo sapiens
ggggaccagagacaggtgtctgggcttgagattggaacagcaagacaagcaagttgcagctctatgcattgtggttctattgcattggtyaaggctaatggtaggttaattttatggaatgtgtgataatcactgaagccaccatactcacaaaatcagtggaaaccctagaaggattg

SEQ ID NO: 2184 - DNA, 179 bp, Homo sapiens
agctcgtggctctcacttatctagtatgtactgcattttccaggctctgttgtctaatctgatcattgcaacaaccctaaaaaacaggcrccactattacctctgttttgttaagaaaaagaatgatagcaagactaatgtaacttattgaagattgcagagctgaatggtagacagaa

SEQ ID NO: 2185 - DNA, 179 bp, Homo sapiens
cacagcaccctggagaagattccctaatagaggcatttgggaccctccaccccactcatggaccaagtccccagctgtccatgcaccagraacacatgtgccacacagactggaggtgaagctggtgtggactgtgtggtgtgggccagatgccaggttgggggatgctgttccccagc

SEQ ID NO: 2186 - DNA, 179 bp, Homo sapiens
ctgggattacaggcgtgcaacaccactaccagctaatttttgtatttttagtagagatggggtttcaccacattggccaggctggtctcraactcctgacctcaaatgatccacctacctcaggctcccaaagtgctgggattacaagtatgagctaccatgcctggcccccaagcttc

SEQ ID NO: 2187 - DNA, 179 bp, Homo sapiens
acttatctagtatgtactgcattttccaggctctgttgtctaatctgatcattgcaacaaccctaaaaaacaggcgccactattacctcygttttgttaagaaaaagaatgatagcaagactaatgtaacttattgaagattgcagagctgaatggtagacagaacttgaactctcagc

SEQ ID NO: 2188 - DNA, 179 bp, Homo sapiens
taaagcacttctggcaggtgtctgaagcctgtgccagtgaaccagtctttcctgggagtagtggttgcaatattatgatgtccggagctrtgctgtccaatacgatggtcactggccacatgtggctattgagcccttgagatatggctagtctcagttgaaatgtgatataaatgtaa

SEQ ID NO: 2189 - DNA, 179 bp, Homo sapiens; identical to SEQ ID NO: 1435

SEQ ID NO: 2190 - DNA, 179 bp, Homo sapiens
cctgctgcccatgggcaccctcactctctctagctcctgcctgaaagcccaaggagcccttggagggcactgacacctattccccccccsccatttctcccagagcacccactactgtttctctccacagcctgagggcagcttcactgggcactgctctgggagtcaggtcaacagct

SEQ ID NO: 2191 - DNA, 179 bp, Homo sapiens
cacaaacccttggcaattaacaaaggaggctgaggcagagttacagctgattgaaaagcaagtgcataaagctcaaataaatagaatagrtccagaaaagatccagaaaagattgatttttccaactcagcattcacctactggtgttgttgttcaagagcaagatcttgtagaatggc

SEQ ID NO: 2192 - DNA, 179 bp, Homo sapiens; identical to SEQ ID NO: 1505

SEQ ID NO: 2193 - DNA, 179 bp, Homo sapiens
tttgagcacccattcctccctggagtccaggtgaaagagaatgaacacaggtgccatgcgagtgcgacctcagccctggcagctgagggyttggctctacgggctggggctggatatcagacgggctcccggacccctgggggcgatgctgcctctcccagtgacaccagccgagtccc

SEQ ID NO: 2194 - DNA, 179 bp, Homo sapiens; identical to SEQ ID NO: 1469

SEQ ID NO: 2195 - DNA, 179 bp, Homo sapiens
tttgatttgaatttcagaagtttccgtatcccccactggcctagcttgatggtctaattaacttccttgtgtaattgctttcggctactytcctagcaggcaacaggaaaatgccacaagtcacccacttatggtggactctcgggaaaaagtgtccattttcaatgccagctgctcca

SEQ ID NO: 2196 - DNA, 179 bp, Homo sapiens
ctatgtacattaacagtgctgcatagcttcaggaagccctaggatctgtagcttcaataatataaaaatttctagtttcttaaatcacaratgttaagatgaccatattatcttctaagcacacaccagaatatttcagatgctcatttcttttcaggcattggtgaagatatggtctg

SEQ ID NO: 2197 - DNA, 179 bp, Homo sapiens
cccaccaccacacccagctaatttttgtatttttagtagagatggggttttaaaccatgttggccaagatggtcgcgatctcctgacctygtgatccgcctgcctcccaaagtgctgggattacaggcgtgagccaccatgcccggcctgtttcaaaagattttgtagtcgtttgtaga

SEQ ID NO: 2198 - DNA, 179 bp, Homo sapiens
atacagtatgtgagatacttacaggaccagtctcgccgcctccacgggttataggcttcttaaagtgcagccagagcccctggctgggaycctgtactctgtgattcgtgggtcaccacattcactctgctaagacttcagcctacccagccagaccttgcccttgaacttcagactca

SEQ ID NO: 2199 - DNA, 179 bp, Homo sapiens
ggtcatttgcaaggcagactgcaaaatgaagctttagctggacacattattacttcaaacaaaataggtcaggattatcttactaaagarggggaaattgtatgtttgctaagcaactaagaatattggcctcatttttttttaaaatgaaaatagtcaaatagggtattgcaagtaaa

SEQ ID NO: 2200 - DNA, 179 bp, Homo sapiens
gggtctcaggatgtctgagtgggagataaaggaccaagaaggggctcttgagatggtagccatggccccacgcccttccacaccctattwgtcctaccttagccctgaggaggggtctcagtgtcaacccctggctgttcttccttggctttgggtctcctgtaggggaggtgagttca

SEQ ID NO: 2201 - DNA, 179 bp, Homo sapiens
cagcttcatccatgtccctgcaaaggacatgaactcatccttttttatgactgcatagcattccatggtgtatatgtgccacatttattyccttctatttcaacttttctaagaatttaaaattataaatggaaattaaactttatcaaatgattttagcatcaattaagaagactatg

SEQ ID NO: 2202 - DNA, 179 bp, Homo sapiens
aggtcaggagatcgagaccatcctggctaacacggtgaaaccctgtctctactaaaaatacaaaaaattagctgggcatggtggtgggcrcctgtagtcccagctactagggagggtgaggcaggagaatggcgtgaacccaggaggcagagcttgcagtagccgagatcacgccactg

SEQ ID NO: 2203 - DNA, 179 bp, Homo sapiens
tttaaactataaactaagttcctcccaaagttacttcagcttacactcaggaagaagcaaggacagcttaaaggttaaaaccaagatggrgtcggtgggcctggtgggtggctcatgcctgtaatcccagcactttgggaggccaaggtgggcagatcacctgaggtcaggagttcgat

SEQ ID NO: 2204 - DNA, 179 bp, Homo sapiens
agcatactgcctgcaaacaaatggttaacaagccacatcctgcacagccctaaatccctcaaaccttgattcaatacagcacatgtttcygtgagcacagggttggggctaaggctacagattaacagcatctcaaggcagaaaaatttttcttagtacagatcaaaatggagtttctt

SEQ ID NO: 2205 - DNA, 179 bp, Homo sapiens
gaacagctgggcctgagacaggctgggtcttcagtaagaacaagcttagatcaaatggggccagaagtccccctaccacccccacaccarcctcgatgatgatctcacaagctcctttttaaggccagtgggatcatggcaactctgccctgggatcctctaaagatgggctgactctg

SEQ ID NO: 2206 - DNA, 179 bp, Homo sapiens
agatggagcaattgccaagattttgccacacttgcttctctcccctaactgtgtcccctgctcctgccactcctttttcttttttttttyttttttttttttttgagacggagtctcgctctgtcacccaggctggagtgcagtagcgcagtctcggctcactgcaagctctgcctcct

SEQ ID NO: 2207 - DNA, 179 bp, Homo sapiens
ttttggttctgcttttgtctctaatggtagcaagatatttatgagattatatttttatctcaccagttgaggaactccaggagagagggmgagagagagagagagagagagactgcttcccaacagctcccacaaatgtcctgaaattgaaattgactctctttgggccatctcagtac

SEQ ID NO: 2208 - DNA, 179 bp, Homo sapiens; identical to SEQ ID NO: 1413

SEQ ID NO: 2209 - DNA, 179 bp, Homo sapiens
ggctgacaccagctttctctatgtccactggaggagcccctccatcttcacatggccctatgcaccatgctgatctctccttactcgcaragccctacacagatgggacgtcagcagacacactgccagagcttgctttcctctgatgacaccagaccctttctgtggtgtggcttcca

SEQ ID NO: 2210 - DNA, 179 bp, Homo sapiens
atcatcaagtgcagggtatgcaaaatatctcaagcactgatcttaggaactgtttagggagggtaagaatcttgtagcctccagctgcaygactcctaaactataatttctaatcttgtggctaatttgttagtcctacaaaggcagtctagtccccaggcaagaaggaggtttgcttt

SEQ ID NO: 2211 - DNA, 179 bp, Homo sapiens
ctgggcggtctggacctccaggcccttccagtctgctcccagcttcccaattccccttcaggctttgaatatctacaggaaagaacttgrccagctgagtcaaggggcttaatgccctggggtccacaggtctggctctaattgacactgggctgacaccagctttctctatgtccact

SEQ ID NO: 2212 - DNA, 179 bp, Homo sapiens
tttatatatatatattacacacacacacacacacacacacacacacacacacacacacacacacacacacacacacacacacacacacayacacctaaaatggcctaaagcagacatccatgtaattacagttgcaaaatgaaaacattttggaaagaacattgtatcatagttcattc

SEQ ID NO: 2213 - DNA, 179 bp, Homo sapiens
tgcactccagccagcctggacaacggagtgagattccatgtcaaaaaaaaaaaaaaatgtacatttttaaaaggggatttatttgagaarcaaaaacaacagaacacttcacaggctactttacacaataaaatagaaaataattacaaatttctgcaagcataaacactcaggtatgc

SEQ ID NO: 2214 - DNA, 179 bp, Homo sapiens
gacagatgcccactgcaggctagtatccctttcaaggctggcccttaaggaaaacagggatcatgcccctacatcctaagttcagggtgyttctgtgtgcatgttcccctccccagggatcgatcataatcccaaaagacacaatcccaaacacaatcatcccaaatgttgaaatcctg

SEQ ID NO: 2215 - DNA, 179 bp, Homo sapiens
cctgcatgctggctcccagggcaggcaccacttggaatttctgcagagcagccagtcccccaatcccacatgatctcagggttgccctgycctgcagtgctgagcaagaccagaggtacaggcccgggggtgggtaaagtcttcctgtgggagtacatggggctgcctgcactcatgtg

SEQ ID NO: 2216 - DNA, 179 bp, Homo sapiens
attgtatctagacttctaaaaaatagctaaggatattttaaaacttaactttgcattatgaatttttttatatcattgaaaattctctcwtacatgccattttaatgcataatagcttatcatacagaagtctctaaatttattgaactgcttccttattttggaatttgggttgattt

SEQ ID NO: 2217 - DNA, 179 bp, Homo sapiens
atataataagcaaaatctcaaaggtcaaggacaaacataggattctaaaggcagaaaaatagaagaagcaaattatatataaagtaactycaattcatctggcaacagacttctcaatggagaccatacagtctaggagagacggaacgacgttttcaaagtgctgaaagaaaacaact

SEQ ID NO: 2218 - DNA, 179 bp, Homo sapiens
ttggaactgttggctgtggaaacaaaggacaacaattcattcctcacccctttctcttctcttatgtctctttgatcaacgttttcttckttgttttttttttttttcttttttttcttttttttttttttttgagacagtctcacccttgtcccccaggctggagtgcaatggtgcga

SEQ ID NO: 2219 - DNA, 179 bp, Homo sapiens
gagaaatatgggccaacaaagaagaataaaaagaaaatagaaaattaaaaaaagaagaaaaacaaaagagactcagaacaaagaaaaatkagagtaggaaaaaatgtgaaggctgatggggaaatgccagcgcacaatgtgttttccctgatgactctgaaaacattgcttgtgttcac

SEQ ID NO: 2220 - DNA, 179 bp, Homo sapiens; identical to SEQ ID NO: 1455

SEQ ID NO: 2221 - DNA, 179 bp, Homo sapiens
caccatcattggcacctgagcatgcctcctgggaggcagaaggcaggccaacccaacttgctatcatcaccacagctgataccaccccaygtgcaacctgttggcctgggcactttcctgaacaacccatctcagccaccaccaacaccagtgcaaattgtttgggagcctgagggttg

SEQ ID NO: 2222 - DNA, 179 bp, Homo sapiens
tactgcctcttttattctacccagatccccactgaggcctcttttgggtcctctgagtgtggcagggctggaggaatgcttggtatgacwcagggccagttgcagaggtggcaagtgtggggtcacgtgaggggtcagagctttgcccctctcaggctggcaaaaccctcctccaggcc

SEQ ID NO: 2223 - DNA, 179 bp, Homo sapiens
acactggcgtttccatgctatttgcagccttcagactggaactgggaaggaaactggaaaacaaacaggagtgaaggcccaagctctgcwcctgctgccatttagaggcctgaaggagacaggtggagtgagaggggaaggaacaatggtgactgaactgactgccgcttggttgacag

SEQ ID NO: 2224 - DNA, 179 bp, Homo sapiens
ctgtgctttctcacccggaggccttatgtggatgtattttagaatcacctggggagctttcaaaaatatcgatgcctgatctacccccakagacttgctatagccagggtctatagcgagagcttccatgatgtttatagtggtaggtttggtcagggcctctttcctgggcttggctg

SEQ ID NO: 2225 - DNA, 179 bp, Homo sapiens
ccggggcaaggttcgggggagttgggtcagggagacactggcgtttccatgctatttgcagccttcagactggaactgggaaggaaactrgaaaacaaacaggagtgaaggcccaagctctgctcctgctgccatttagaggcctgaaggagacaggtggagtgagaggggaaggaaca

SEQ ID NO: 2226 - DNA, 179 bp, Homo sapiens
actaacatcacctgggagcttgttagacgtgcagaatctcaaggctcagaactgctaagtcataatctgctgcttaacaggagtcccagrtgatttgggtacacattaaagtagcactggactaaaactcagaaaggtttagtggctttcccaggtttccagagcaatgtggtagccca

SEQ ID NO: 2227 - DNA, 179 bp, Homo sapiens; identical to SEQ ID NO: 1461

SEQ ID NO: 2228 - DNA, 179 bp, Homo sapiens; identical to SEQ ID NO: 1462

SEQ ID NO: 2229 - DNA, 179 bp, Homo sapiens
tccatacggcgttgttctgggtgagttccgtgtagcgtccctggcgccttccagggctagaaaaatgagcttttcctgctcaaatgaagrgtgagaagactagtgatgaaagccggtcagactggatctgtctcccgcccggcgcgccccaccttaggcctgcggcccgcacgtggcca

SEQ ID NO: 2230 - DNA, 179 bp, Homo sapiens; identical to SEQ ID NO: 1422

SEQ ID NO: 2231 - DNA, 179 bp, Homo sapiens; identical to SEQ ID NO: 1428

SEQ ID NO: 2232 - DNA, 179 bp, Homo sapiens
acaaagcaaggagacttcgagtaacttcacaggcttgtgggcagcttcagggccacctcttgcccagaccctgcaagttgggacactttyctgctcactatggcctggaggacaaaaccacctcacttggacatttccagaataaagaatggggaaaagcagactaggttttcaatacc

SEQ ID NO: 2233 - DNA, 179 bp, Homo sapiens; identical to SEQ ID NO: 1429

SEQ ID NO: 2234 - DNA, 179 bp, Homo sapiens
ccaggtttggggcctaagcaccctctggatgttcacactgaacgtgttcctggggctcagagagggtagatctgggaggggcctgaggcratgttaaatgtgagaccaaacgtgctgggagagatgtgacagacggaagatggagacttaggccggggcaaggttcgggggagttgggt

SEQ ID NO: 2235 - DNA, 179 bp, Homo sapiens
agccaagtgtgatttggaagagaaatattagaaactaaaagatcccttagtaaatgaacattgaggagatatatatatatatatatacayacacatatatatacatatatatatacgcatatatatatatatataaaatctcccaaaataaagctagatttatttacaggttgcaaatg

SEQ ID NO: 2236 - DNA, 179 bp, Homo sapiens
ttgaagataggcagtctaggccaagttttgtggttctataatcatcaggaacccatcaattctgtctttctaattcaccatcctaattcrcagcttctgtcacctcgtagtccaaggtggtttctccatctgtctcatttgtatggtaagctggatggaggagttaaaacagaactcaa

SEQ ID NO: 2237 - DNA, 179 bp, Homo sapiens
gctactcaagaggctgaggcaggagaatctccttaacctgggaggcagaggttgcagtgagcccagattgtgccagcctgggtgacaaartgagactttgtctcaaaaaacaaaaaaccaaacacacacaaattgatttcagaaatgctgcaatagtttttgctcccactggaagatct

SEQ ID NO: 2238 - DNA, 179 bp, Homo sapiens
cttcgcactctgccttggggagaggccacttagagctccaggctcacacactcccaccttaacaatctctgagagccaatctggctcttkgcagagataggccctgattgctcttgctcttgtgtgggtcatgtacccgccccttcccctgctgggtgacagggaggatctgtctccag

SEQ ID NO: 2239 - DNA, 179 bp, Homo sapiens
ccttcacaatagccaaaatatggaattgatctaagtactcctcagtagatgattcaataaagaaaacaggtgtgtgtgtgtgtgtgtgtrtgtatatatatatataatatgtatatatataaaatatgtatatataatatgtatatatatatgcaatgaatcattattcagctatctaa

SEQ ID NO: 2240 - DNA, 179 bp, Homo sapiens
gaagatcttaggaaaccaaaccaaagtatcttttttctactagtttggcttgccttgcaaaatcccctgaaagcagcttctgacattacstaaaacaattcatatagtagacatttgaccaatgtgtctctaatcattacagtcttgtatggcatgaacatcagattattgacatttta

SEQ ID NO: 2241 - DNA, 179 bp, Homo sapiens
ttactgaggagacaggacctgcctatagcacagtgaagttcatacggaagtgttggggtccaaagagaattgagaaataagaccctgggraccagccaggccccaaggaggtggcaggaaaggaaggtgagaccaggcaaattggctgattgtttccctgaatgtgtggctggctaaac

SEQ ID NO: 2242 - DNA, 179 bp, Homo sapiens
ttatttgtgggagctaaaaactaaaacaattgaactcatggaggtagagagtagaattatggttaccagaggctgagatccatagttggsggtggaggatagtgggaatggttaatgagtatgaaattataatgagataaaatgaacaaaatctagcatttgatagcacaaccgggtga

SEQ ID NO: 2243 - DNA, 179 bp, Homo sapiens; identical to SEQ ID NO: 1445

SEQ ID NO: 2244 - DNA, 179 bp, Homo sapiens; identical to SEQ ID NO: 1420

SEQ ID NO: 2245 - DNA, 179 bp, Homo sapiens; identical to SEQ ID NO: 1443

SEQ ID NO: 2246 - DNA, 179 bp, Homo sapiens
aggaaaattgcttgaactcgggaggcagaggttgcagtgagcggagattgcaccactgcactgcactccagcttgggcgacagagcgacwctctgtctcgggcaagggtgggcgtggggaagacttctacctgctttgggggtggggctgggggcgggggcctcagggaaggattgaaa

SEQ ID NO: 2247 - DNA, 179 bp, Homo sapiens; identical to SEQ ID NO: 1450

SEQ ID NO: 2248 - DNA, 179 bp, Homo sapiens; identical to SEQ ID NO: 1449

SEQ ID NO: 2249 - DNA, 179 bp, Homo sapiens
gctctcactggaaccacacatgctaggcactgtgccagggcttgactgtcaaaggtcagaggtcagcactccccatccttgagaaaaccrtagcttatgcggagacagatgatgcaaacagttcctgctagaggactctgacagtgggatatacaggatctgtaggaacctaacaaggg

SEQ ID NO: 2250 - DNA, 179 bp, Homo sapiens
gaaagtcaaccataaaaaaggttagaaggaatagccaacattttgttagggagattactgaaaattaatataaatgagtaaattatttayaaaagaacattttcttagaaaggagatgtgcatgtcactggtaagaacatctcccatatttcacctaaaagcttaaatatacatcaagt

SEQ ID NO: 2251 - DNA, 179 bp, Homo sapiens; identical to SEQ ID NO: 1458

SEQ ID NO: 2252 - DNA, 179 bp, Homo sapiens; identical to SEQ ID NO: 1482

SEQ ID NO: 2253 - DNA, 179 bp, Homo sapiens; identical to SEQ ID NO: 1438

SEQ ID NO: 2254 - DNA, 179 bp, Homo sapiens
agctgggcatggtggctcaggcctataatcccagcactctgggaggccaaggcgggaggataacttgagctcaggagtttaagaccagcstgggcaacatagagaccttgtctcttaaaaaaaaaaagtaataataagaccacttaattattgtaaagtaaataataatggactggttg

SEQ ID NO: 2255 - DNA, 179 bp, Homo sapiens
ggactggttgatcaaacctgaaagaaaatattcctaaatggttcctcatttgcccttcaatcctctctttcagtgtaaacctgtctcatmcaagattttgacctcaatcttacacatttttagcaccacattctccagcattcaatcgtaaacagaggaatatgataccaactgagctg

SEQ ID NO: 2256 - DNA, 179 bp, Homo sapiens; identical to SEQ ID NO: 1456

SEQ ID NO: 2257 - DNA, 179 bp, Homo sapiens
gccaggaattttggttgtgttaaccaggtacctggaataattggatcaatcttagaatgttttgcatgccaagggtcactaaggtaaccracaatgactaggaaccaacaatgacaatcagtccctgcatgtaaggacagttggccctgggcacctcaccctagttcttagctctgtct

SEQ ID NO: 2258 - DNA, 179 bp, Homo sapiens
acgtagatttggtcttttcacatagtcccatatttcttggaggctttgttcatttctttttattcttttttctctaaacttctcttctcrcttcatttcattcatttcgtcttccatcactgataccctttcttcctgttgatcgcattggctactgaggcttctgcattcgtcacgta

SEQ ID NO: 2259 - DNA, 179 bp, Homo sapiens
gcaataattcctcaacagcatccagatgcaatttttcatgcttttttcagttagtttaaaatcatgagcttttctccatgtctctaaaaygtaattactaatgcttctaatactattccaccaggttgagtgtattataaatgatctgatcaccccttgcctcccactcttccatcccc

SEQ ID NO: 2260 - DNA, 179 bp, Homo sapiens
acggtccttgcactgctcttccaatctctgcttggaacgtctgccagacattggcctggctaaccccaacttcaaacccgctcaaatgtsaccaaagtgcgcctactctgatcatcctatttaaaagtggtaacctgcaccttcccctccaccccaccccttcccttcccaagttctct

SEQ ID NO: 2261 - DNA, 179 bp, Homo sapiens
taccccttttattttctctttgccttctgagacaccaaacatttaaatatttggttgctttatggtgtcccgtatgtcatgtaggttttrttcattcttttttattttgatctgactggtttatttcaaaaaaacctgtcgttaaattctgaaagtctttttttaatttaatttttttt

SEQ ID NO: 2262 - DNA, 179 bp, Homo sapiens
ggcggtggtacatgcctataatcccagctacttgggaggctgaggcaggagaatcacttgaacccaggaggcagaggttgcagtgagccragactgtgccattgcactccagcttaggcaacaagagcaaaactccgtctcaaaaaacaaaacacaaacaagaaagaaaacccaaaaaa

SEQ ID NO: 2263 - DNA, 179 bp, Homo sapiens
tgcctcctctcaggaaacccagctccctccaaagcgccctctgggcctgggatgccctgagcaatgcaagctttcttgcctgctttcacrtggttcaattttcctttttttttggctcaatttttttctgcctcaagttttctacctcaagtatttcaaaaattaatttttttttcttt

SEQ ID NO: 2264 - DNA, 179 bp, Homo sapiens; identical to SEQ ID NO: 1448

SEQ ID NO: 2265 - DNA, 179 bp, Homo sapiens
agattattattgttaacccaggaggctgtcaaattagaaatgaatctgtgcctcaaaagttaaagaaaccagtaactaatagaaataatygagtttgcaagatggcagctaagaaagaaataatttgttgttaacactgaaactctctctgcttatgagataaagtaactaacatcagt

SEQ ID NO: 2266 - DNA, 179 bp, Homo sapiens
cagcctcgctgccaccttgcagtttgatcttggactgctgtgccagcaatgagcgagactccgtgggtgtaggaccctctgagccaggtrtgggatattatctcctggtgtgccgttttttaagcccattggaaaagcgcagtattagggtgggagtgacccaattttccaggtgccgt

SEQ ID NO: 2267 - DNA, 179 bp, Homo sapiens
tattgattcttcctacccatgagcatggaatgttcttccatttgtttgtatcctcttttatttcactgagcagtggtttgcagttctccytgaagaggtccttcacattccttgtaagttggattcctaggtattttattctctttgaagcaattgtgaatgggagttcactcatgatt

SEQ ID NO: 2268 - DNA, 179 bp, Homo sapiens; identical to SEQ ID NO: 1457

SEQ ID NO: 2269 - DNA, 179 bp, Homo sapiens
aatcagcgctggctatgccgctgtactgtattgccacatggtccacattgcatgcaagattgctgagctgaaggaaaagattgattgccrttctggtaaaaagccagaagattgccctaaattcttgaagtctgatgatgctgccatcattgacatggttcctggcaagcccatgtgtg

SEQ ID NO: 2270 - DNA, 179 bp, Homo sapiens
ttatatgttggattacatttattgatttgcatatgttgaaccagccctgcatcccggggatgaagcccacttgatcatggcggataagcyttttgatgtgctgctggattcggttttccagaattttactgaggatttttgcatcgatgttcgtcaaggatattggtctaaaattctct

SEQ ID NO: 2271 - DNA, 179 bp, Homo sapiens
gacatttatatagtcaacaaacatatgaaaaaaaaacaaactcaacatcactgatcattagagaaatgcaaatcaaaaccacattgagayaccatcttacaacaatcagaatagcaattattaaaaagtcaaaaacaacagatgtgctcttgaggttgtggagaaatggaaacgctttt

SEQ ID NO: 2272 - DNA, 179 bp, Homo sapiens
tgatgaccagtggattaaccaacaagacccagatcaccccatctgaatagtcctatggcaaaacccaaccaccagtaagaaggacaactrccctgctctgaccacaccggaagctggtcagtctacacatggctaaagcttgaggatcctgcaagatctgctctagtcacatcccggaa

SEQ ID NO: 2273 - DNA, 179 bp, Homo sapiens
ctaaataataaatatcctcctggccaggcgcagtggctcatgcctgtaatccctcatgaggccgaggagggtgggtcacaaggtcaggaratcgagaccatcctggctaatgtggtgaaacctcttctctactaaaaatacaaaaattagctgggcgtagttgcaggtgcctgtagtcc

SEQ ID NO: 2274 - DNA, 179 bp, Homo sapiens
atgtctgtcaaggatgttcatcgtggcaattgacagcaaaaatgacccaccaatggagtcagctagcttcactgctcatgtgattatccygaaccatccaggccaaatcagcgctggctatgccgctgtactgtattgccacatggtccacattgcatgcaagattgctgagctgaagg

SEQ ID NO: 2275 - DNA, 179 bp, Homo sapiens
aggctatttacaaagagaaaagacttttaactgctgaaagtaaaaaaataaagtacaaggaagaaattctatggctcttaaatgctgtayaggccccaaaagaggtggcagtgatgcactgcaaagggcaccaaaaagcaagaacactaaaggctaaaaaaatagaaaggcagacaaag

SEQ ID NO: 2276 - DNA, 179 bp, Homo sapiens
ttattgttgttaaaatgacaatactaccccaaatgatttacagattcaatgctacccatatcaaaataccagtgattttcttcacagaartagaaaaaacaatgctaaaatttgtgtggaactacagaagatgccaaatagccaaagcaatcctgagcaaacagaacaaagctggaggc

SEQ ID NO: 2277 - DNA, 179 bp, Homo sapiens
aagttaaaaaatggaatccaaccactctagaacccatacaggataggccccatattgtaatcatgtctactcccactgctgttaaagttrcaggtctcacaccttggattcaccatagccagctgaaaccagcggcagcagtaactcctgatgatgaccagtggattaaccaacaagac

SEQ ID NO: 2278 - DNA, 179 bp, Homo sapiens
tcatgtctactcccactgctgttaaagttgcaggtctcacaccttggattcaccatagccagctgaaaccagcggcagcagtaactcctkatgatgaccagtggattaaccaacaagacccagatcaccccatctgaatagtcctatggcaaaacccaaccaccagtaagaaggacaac

SEQ ID NO: 2279 - DNA, 179 bp, Homo sapiens
ccaaagctaagaggaccatctccggataagtaaatgtaaatacaatttataagcctagttataattctgtcaatactgattgttctgttrttatgttattactgcaaatgctgcaaatgtctaggcccagaggaaggtttgccgtgcccatgtgtagtataagcatgtttctattacat

SEQ ID NO: 2280 - DNA, 179 bp, Homo sapiens
tgagataccatctcacaccagttagaatggcaatcattaaaaagtcaggaaacaacaggtgctggagaggatgtggagaaataggaacasttttacactgttggtgggactgtaaactagtttaatcattgtggaagtcagtgtggtgattcctcagggatctagaactagaaatacca

SEQ ID NO: 2281 - DNA, 179 bp, Homo sapiens
aacaaaaacaaaaacagataaatggaactatattaaactaaaaagtttctgcacagcaaaggaaacaatcaataaactgaagggacaacycacagaatgggagaaaatatatgtgaactatgcctcagacaaggaattaataaccagaatatataacgagctcaaacaacttaatagga

SEQ ID NO: 2282 - DNA, 179 bp, Homo sapiens
atatgcttccccctgcacagatctccccccaccccatgaaatgcttaaaaggtaacttaactctttgttcagggctcagtcctttggatrttaatctgactgggccggtgcacctaaataataaatatcctcctggccaggcgcagtggctcatgcctgtaatccctcatgaggccgag

SEQ ID NO: 2283 - DNA, 179 bp, Homo sapiens
gcatgttgtaacccaatgcaaacaagttaagaatcatgatgaaacaatacaggagctactaactagaatagccagtttagagaggaacayaactgacctcacggagctgaaaaacacaacatgagaacttcacaatgcaatcacaagtatcaatagcagaatagaccaagcagagaaaa

SEQ ID NO: 2284 - DNA, 179 bp, Homo sapiens
catgttctcactcaaggtgggaactgaacaatgagaacacagggacacaggaaggggaacatcacacactgaggcctgctgtagggtggraggagggggaaaggatagcatttggacatatacctaatgttaaacgatgagttattgggtgcagcacaccaacatggcacatgtataca

SEQ ID NO: 2285 - DNA, 179 bp, Homo sapiens
tagggtgtcaattttagatctttcctgctttctcttgtgggcatttagtgctataaatttccctctacacactgctttgaatgtgtcccrgagattctggtatgttgtgtctttgttctcgttagtttcaaagaacatctttatttctgccttcatttcgttatgtacccagtagtcat

SEQ ID NO: 2286 - DNA, 179 bp, Homo sapiens; identical to SEQ ID NO: 1452

SEQ ID NO: 2287 - DNA, 179 bp, Homo sapiens
taattccctagaaatttatctcacttgctcaagttgaatgatgaggagctcctctgcaaaaaaaaaaaaaaaaaaagaaagaaaaaaagwaaaaagagaaagaaagaaaaagaaaaagaaaaagaaattcatcccagttgtgatctgtctcaaaagtttgttcctttttatctcttgat

SEQ ID NO: 2288 - DNA, 179 bp, Homo sapiens; identical to SEQ ID NO: 1453

SEQ ID NO: 2289 - DNA, 179 bp, Homo sapiens
tccagtgagtactctgggctccctctcgtgggcagggaagctgagggccccatgagctctcccagcttcctgaaggctccccattaatgrgagctgactgtgctgtgctttgctgactgcagggcctgctccctgccccccacctccaggttggggtaagtggcacctctctccctcca

SEQ ID NO: 2290 - DNA, 179 bp, Homo sapiens
agggacctgaggaacagactcatctttccacgtctcacccagggatggagccaggtcctcagaagatgttccagtgcctgggctcctggktgtcaggtggtccccacacctctcgacttgctgcagctgctcctgctagtgagagagggtcccaactgggtgcctggccccacccttag

SEQ ID NO: 2291 - DNA, 179 bp, Homo sapiens
acaggatctgtaggaacctaacaagggaagaacgttaatttggggagttggagaaaatgtcacagtgacaactgagtagggctttgaagkatggatagaaacttgccccactgtagagagaggaagttcagcgccgcacgggaagagaggataatggttatgggcacaggttccatgtg

SEQ ID NO: 2292 - DNA, 179 bp, Homo sapiens
cactgcctctggcctttctctgccctcctccctaccatcttccccctgccctccctccctgctctcactggaaccacacatgctaggcaytgtgccagggcttgactgtcaaaggtcagaggtcagcactccccatccttgagaaaaccatagcttatgcggagacagatgatgcaaac

SEQ ID NO: 2293 - DNA, 179 bp, Homo sapiens; identical to SEQ ID NO: 1459

SEQ ID NO: 2294 - DNA, 179 bp, Homo sapiens
tgtcttctattttcttctaacttagaagttctatgtgttgtgtgcccaaattctgattaacatggtgtatttatgcaatgaccattcaarcactgttgacttcagtgtctttaattcttcccttctgagaaacaaagattaagttaactttctcttccttgtctaggggagaagagata

SEQ ID NO: 2295 - DNA, 179 bp, Homo sapiens
ctttaaaaaagtggcactttcctctgacactgtgggaaaggccttttctctctcttgcttccacttttctaactgtagaatgagggtgtrggctcaaatgtctattccataaggccctctgtggtcttaggctgacttcttgggaataagcattctcttctctttccatttttcctttt

SEQ ID NO: 2296 - DNA, 179 bp, Homo sapiens
ataacaagttctaaaattgaggcagtaattaatagcctaccaagcaaaaaaagtccgggaccagatggattcacagccaaattctaccakaggtacaaagaggaactggtaccattccttctgaaactattccaaacaatagaaaaagaggaaatcctccctaactcgttttatgaggc

SEQ ID NO: 2297 - DNA, 179 bp, Homo sapiens
agtcattcaggagcaggtttttcagttgagtagtttccatgtagttgagtggttttgagtgagtttcttaatcctgagttctagtttgaytgcactgtggtctgagagacagtttgttataatttctgttcttttacatttgctaaagagtgctttacttccaactctgtggtcaattt

SEQ ID NO: 2298 - DNA, 179 bp, Homo sapiens
tatacatgtgccatgttggtgtgctgcacccagtaactcgtcatttagcattaggtatatctcctaatgctatccctccccgctcccccsaccccacaacagtccccggtgtgagatgttccccttcctgtgtccatgtgttctcactgttcagttcccacctatgagtgagaacatgc

SEQ ID NO: 2299 - DNA, 179 bp, Homo sapiens
tgtgtgtgtttgtgtgtgtgtgtgtgtgtagaaaacaggagggattgattcatagttgagtcatttgttcttgattatagcactcaaccygcaaattacattcacctcttggtaacaaaggggaaacttcctcttccctgagccatttcactcagatggaattattcctgggtaatcct

SEQ ID NO: 2300 - DNA, 179 bp, Homo sapiens
tggccctgcttttttcttcatagcccttccccacagtaaggatgggggccgggggcttggcagcagcttattcaacccatcgactgttcwtcagtgtctgggtgccaggccaggggaactgcaaaaggcccaggtcattcaggtaccccctccaaagtgcatagggcacccccctaccc

SEQ ID NO: 2301 - DNA, 179 bp, Homo sapiens; identical to SEQ ID NO: 1473

SEQ ID NO: 2302 - DNA, 179 bp, Homo sapiens
tggaattgctttgaaggatagggtcagctgaagttcctgttgagactacagtgcagctctccctctgctcagtcctgctttcttcccttyccctcctttcccaggtgttgattgcaaaagtactttcaaagaaacttcctgcacactagtctccatctcagaatctgcttctttggata

SEQ ID NO: 2303 - DNA, 179 bp, Homo sapiens
tggcacatatccaccatggaatactatgcaaccataaaaaatcatgagttcatgtcctttgcagggccgtggatgaagctggaaaccatsattctcagcaaactaacacaggaacagaaaaccagtcactgcatgttctcacttataagtgggagatgaacaatgagaacctatgggta

SEQ ID NO: 2304 - DNA, 179 bp, Homo sapiens; identical to SEQ ID NO: 1475

SEQ ID NO: 2305 - DNA, 179 bp, Homo sapiens; identical to SEQ ID NO: 1476

SEQ ID NO: 2306 - DNA, 179 bp, Homo sapiens
gtttagttcattgttacgctatggaggcagttcattgttagtgcattgttacactatggatgcagtcctttggggttccagctttggagyattatcctctttgactctctgccttgagtaagccatgagctttttctgtctctttagctccttgaagtagaaaaagtcatactcaattt

SEQ ID NO: 2307 - DNA, 179 bp, Homo sapiens
ctgttttctcattgtttcgcctttcttgacttctttctgctttcctgcttttgtttttattcctcctcctcctccttctcctcctcctcytcctcctcctatttctcctcctcctcctctttctcctcctcctcctctttctcctcctcctctttctcctcctcctcctctttctcctc

SEQ ID NO: 2308 - DNA, 179 bp, Homo sapiens
attcaggaattttgcaaatctctaacttgaaatcaaacattataatttaggactttttttttctggaatctccactgtgtggacacctcrccacctaatctagtgaagcaagagggcccaacttagaaaccacggctatgggtggaaggcgacccatgaacagtttataaggcattaac

SEQ ID NO: 2309 - DNA, 179 bp, Homo sapiens
gagtggtagcatgcacctgtaatcccagctactccggaggctgagacaggagaattactggaaccaaagaggcagaggttgcagtgagtygagatcgtactacgccaggcactccagcctgggtgatagagcaagattctgtctctgaaagaaagaaagagagagagagaaagaaagaa

SEQ ID NO: 2310 - DNA, 179 bp, Homo sapiens
gaacacatctgcatattagaagatgtctgttatctgggaccaaaggtaccttgcagaggccatgttatgtctcctgtgacttgagaaatscctttcttgtagatttgtgaccagcatgattagcttccttctcctattccgtggtgtttccaagagtcagccagtggcctctcactgaa

SEQ ID NO: 2311 - DNA, 179 bp, Homo sapiens
tgtaaaggattttataattttcctctcccttctttgaattttctttctggcatttatcagcggctggagagaatgcctattacacaccaragatggggcatagtgttttggtaaaagtattaggatgtaacagctataaaagggttggctaggttgagggttctcatctacagcaagtc

SEQ ID NO: 2312 - DNA, 179 bp, Homo sapiens
tgagaattctgggacttcttaggagaccaagcaaccttgccccagagccaggcttgggcattccagagaggctgaactccagagtgacaygagatcttgcccttgtgggctgggctttcagatgcagacactgattccctggtggccaagcaaccaggagcctcaggtgcctgacttgg

SEQ ID NO: 2313 - DNA, 179 bp, Homo sapiens
gaatatacatccttctgagcaccagatcgcacttattctaaaattgaccacataactggaagtaaaacactcctcagcaaatgtaaaagwacagaaatcacaacaaactgtctctcagaccacagtgcaatcaaattagaactcaggatcaagaagctcactcaaaaccgcacaactac

SEQ ID NO: 2314 - DNA, 179 bp, Homo sapiens
gactgactcacaggggtaggagattaaaattggacctcagtactttccaaaaatggatgctggcaaatctcttctgtcttaggatgggtyccttagagctataccttaagattagtgtaaatcagacatagggcagcccttgaaggaactggcacctaacttccagttttctcaatcct

SEQ ID NO: 2315 - DNA, 179 bp, Homo sapiens
ttaagattagtgtaaatcagacatagggcagcccttgaaggaactggcacctaacttccagttttctcaatccttagaaattggtttgargcaatctcaggttgctatcattcccccaggaaccagacagaatcaaatattaatcctctctagaggaagataataccattctatttgtc

SEQ ID NO: 2316 - DNA, 179 bp, Homo sapiens
cctggatgtcatccttcttggagattgtctatcggggatccagtgttcctttttccagtctagccccaccttcagggagcaaacctcagktcattagggccaagcaagatggactgcattgacacaggccccatgcaattcaggacagtgggggtgccgatgggctttcctactcctga

SEQ ID NO: 2317 - DNA, 179 bp, Homo sapiens
tgtgtaagaaatccgactgcactaaccatgcctaggaaggaaaggagttgttgttttgtaacagattgaggtttgggagattaattgggyacaatcagcagggagagcacgtgtgtttttatgagaattatgccgagataggtaacagatgaggacgaaatttgggcttgactgaagta

SEQ ID NO: 2318 - DNA, 179 bp, Homo sapiens
tctaaagggcagccttaccatctccttttaagaacagaagtcttttctttctgcctcttaaagtcagtagctggtttgtcacccaataamaaaagcccacaatatcctgacctcaaagactaggaaggtaggtggtgctaaggtcagggattgggagtcttagagagccagcaacacag

SEQ ID NO: 2319 - DNA, 179 bp, Homo sapiens
atttccgagctcccctctaatttcaaccaattcagtggttccacatacatgtggatgaatccaatccatatctctctgtcgcctccagamcccatgtccgcacactggacacctccatatgaacttgcatctccctttacaaactaaactccccagaattgaactggtcacccctttct

SEQ ID NO: 2320 - DNA, 179 bp, Homo sapiens
tgcatttctttgattaatagtgaggttgaaaattgtccaagtttgttagagattggtatttctgttcatattgctgttggagtggtcttrggttattcttttccgtatatatgtagcctttactcaatatcgatatttagtctttgtcgtaattactacaactattttgttttcccttt

SEQ ID NO: 2321 - DNA, 179 bp, Homo sapiens
ctgtgttagccaggatgatggctgagccttctgattgtaataggacagtaaggagataaaataaactacatagtcaaacaaggtgaaccrtcttagaagcagaacctgaaggaactggggagcaggagagggaggcacagaggagctggaagctgaaaggaaacaggcaggggaaagaa

SEQ ID NO: 2322 - DNA, 179 bp, Homo sapiens
gccaaataagggaataaaagcaggccacctgaactagcagggcaaacagctgtttgttgttttgctgttcgtgataagtgttgccgctgygcactgtttgggtctgccctgcgttcatgagctgtaataccaggaaggtctgcagcttcccttgtgaagccaggagtctatgatttttt

SEQ ID NO: 2323 - DNA, 179 bp, Homo sapiens
ttcatcaccagcaaaaagaaagtttctttgctgctgatcccttctccctcagaagcaagggtccttgtcccctgtcccctccaaagctcycaccagtggggaggctgctggggccacttctggctagtcacttgtgtagcctggaccctgagcccacacttgctgtcccttgtgggcac

SEQ ID NO: 2324 - DNA, 179 bp, Homo sapiens
ctccccacggggcccagcctctgtccacaggctactcactggccctgctttttcctctctctgccttcttcatgtatttagccgcagggsttttactccagctcccttctcccaatcctatcaccctggatacctgccctagacaacttaatcttgtccctaaatacggctttctggaa

SEQ ID NO: 2325 - DNA, 179 bp, Homo sapiens
cagacagcattgttttgatgtcaaagaaggctaactaaaacagaagatccaaatgagatccagcctcattacatagcatccaaaatgtcyaaggttgaaaatcagtcatcataccaagaactagggaaatctcaacttgagcaagaaaagacaaccaacagatgctaacaccaaaatga

SEQ ID NO: 2326 - DNA, 179 bp, Homo sapiens
cttcctccctatctctacgaggctgggacctctcttcatgatcagacatctgatagtgcccctcaggctgggctgaaagactgtgaagcrgctctgatggctggccatgtggcacgaaagcttcccagggaccccagaagatcctccccactcccacaaaaccaggagcctggctcacc

SEQ ID NO: 2327 - DNA, 179 bp, Homo sapiens
gtaaactccagtttttaatgaccttagttccccccaccccctgcctccaacagtcttatgaggaattccagttataactggcttctttgstggaatttgagatacactctcttctctgttaagcaaatactgcagattacaaatatttcagttccaggtaagtagttatgtgatgtgta

SEQ ID NO: 2328 - DNA, 179 bp, Homo sapiens
ccctccctgcctcctggcctcatccatcttccatatcgattgtagtagccttccaggagagcagcctagccattggcccactgagacttytctgccagggctgggctgggtcctgtcctgtacccagaatctgtgctcaagttctgtgctgtcttctctcagggctccctcacggatta

SEQ ID NO: 2329 - DNA, 179 bp, Homo sapiens
tagatgggatggcggccgggcggagacgctcctcactttccagactgggcagccaggcagaggggctcctcacatcccagacgatgggcrgccaggcagagacactcctcacttcccagacggggtggcggccgggcagaggctgcaatctcggcactttgggaggccaaggcaggcgg

SEQ ID NO: 2330 - DNA, 179 bp, Homo sapiens
ggttacggaaggctatcactctgtagacttgggagtgctcactgggtgccatcgtaagaaccagcctcttctgtgtctgggctatgccaygcagcagcacctgcaggctcttccaagctttgtcagcaccacaacttgggcacagcacagcagtgccaggtgtggaaagcagaagtcta

SEQ ID NO: 2331 - DNA, 179 bp, Homo sapiens
aatacaaaattagccgggtgtggtggcgcatgcctataatcccagctactcgagaggctgaggcaggagaattgcttgaacccgagaggyggaggtttcgttgagccgagattgagccactgcactccagcctgggcaacaagagcaaaactccgtctcaaaaaaaaaaagtgtatgtt

SEQ ID NO: 2332 - DNA, 179 bp, Homo sapiens
atatttgaattgaaatgtaccatgtcgctggctgttttctatttgttctgttaaccaaaatgagtgactaaggcaagagtctctatcaaytgatgtttattgagctcgagcttgagggcatgcccaagataaacaggagtcacagaaatcttctgtggcttatattctccctgaagggg

SEQ ID NO: 2333 - DNA, 179 bp, Homo sapiens
gctcctcctgagcccatgggggccttttgccctaactgcttctccctgtatgctgggctgttccgttccctggggttctcttctgacagycggaggacccctgccaggcactccaccaactccagcaccaaccctgccctgctcacccagtctcattttcagggaacttggaagtcttt

SEQ ID NO: 2334 - DNA, 179 bp, Homo sapiens
gagtctctctctgtcattcaggctggagtgcagtggtgtgatcatggcccactgcagcctcagactcccaggctcaagtgatcctccccrcctcaggctctatactaggtgggactacagacgtgcaccaccacacctggcttttttttttttttttttttgagacagggtcctgcttt

SEQ ID NO: 2335 - DNA, 179 bp, Homo sapiens
aaagaagaaaaagcagggaaaggggttagggactgctaggggtggaggtggggtttcagttttaggtcagggaaaacctcactgagaagrtgacagttgaggaaagacctgaagaaggtgaagaagtgaatgatgtggttatctgcaggaagtttgttccaagcagaggacaacaagaa

SEQ ID NO: 2336 - DNA, 179 bp, Homo sapiens
taacagttaaaacatagtaatagacactgtttattaaatgtttaccatgtgccaggacctgtgctaagtaagtgccttctatttattatyttgtttaatcctccagcaatgctagtaattgtcctcattttacggatgaggataaggaggctcagaaaagctgagtgtctctcccaaat

SEQ ID NO: 2337 - DNA, 179 bp, Homo sapiens
ggatatgaacagacacttctcaaaagaagacatttatgcagccaataaacatatgataaaaagctcatcatcactggtcattagagaaawgccagtcaaaaccacaatgagatggagtctcataccagttagaatggagatcattaaaaagtcaggaaacaacagatgctggagaggat

SEQ ID NO: 2338 - DNA, 179 bp, Homo sapiens
gctttacagatgggaaatctgactgtaggagagatgaagtgagcccctgtctgtatgaagccaggcctgtgagcctacccattgcaccayattgcctcctacctctgcgtgcagagagtgggataaaagctcatggcttgcctatggcccatctgcctggactgtgtctgtgaccccca

SEQ ID NO: 2339 - DNA, 179 bp, Homo sapiens
aacttcactgctagcataaccagcatttgagaaagccagcatactaaatgtatctacagccaaggactctcacagagtctacttcactcycctgccacttccaccagagcaggtgctggtatccacagctgggaaacctgaaaacagatcacatcacaggactctttgcaaacattccc

SEQ ID NO: 2340 - DNA, 179 bp, Homo sapiens
tgtaaagttccatttgatgtgctgggggaagggaatatggcagtgaggaagccgtgttgtttgagatttaccaggaccaaataagagaayaggtgtcatcgtgtagggatcagtgccctaatgttttcataatatgcatgtacatgggaccatgagaaccataagcagggagttattgg

SEQ ID NO: 2341 - DNA, 179 bp, Homo sapiens
ctgccaaacacctgactgttctagcagtctgggaccaagctgaggttttctcagatgatctgcttgctagacaatccctgggtacagtcrttctggagtctcagcctggaggagggggtgtttcatcaggatagccacttttggtaggccctggactgcaactcttatcccttcagctc

SEQ ID NO: 2342 - DNA, 179 bp, Homo sapiens
gtttattttaatagcttttgaggtacaggtggttttttggtattataacatgggtaagttctttagtggtgatttctgagatttaatgcmcctgccactggagcagtgtacactgtactcaatatgtagtcttttatccctcaccctctcctaacgtttcccccacacaagtccccaaa

SEQ ID NO: 2343 - DNA, 179 bp, Homo sapiens
tgaaatctccaaatgttcaagcataacattttttttcctttagtaatcaaagagactgttacacatttatacaatctattatatgctatrtgcataatctgtccatgttattattaaaaatagaatatttctcacaactaataataaactaaaatggaaagactggataacattcaatt

SEQ ID NO: 2344 - DNA, 179 bp, Homo sapiens
aagggttcaaacggaggagcaggtccaggggaactcagcagagagtgaattggctgatcaatcagtttgtttcttctgcaaacattcccrgctccttatctgtgccaggtgctggggcaggggctgaagactgtgttatgaacaaacaggtctggcctggccttgcacagcccttagac

SEQ ID NO: 2345 - DNA, 179 bp, Homo sapiens
tgcctgtaatcccagcactttgggaggccgaggtgggtggatcatgaggtcaggagtttaagaccagcctggccaatatggtgaaacccygtctctattcaaaatacaaaaattacctgggagtggtggcatgtgcctgtagtctcagctgctctggaggctgaggcaggagaatcact

SEQ ID NO: 2346 - DNA, 179 bp, Homo sapiens; identical to SEQ ID NO: 1753

SEQ ID NO: 2347 - DNA, 179 bp, Homo sapiens; identical to SEQ ID NO: 1747

SEQ ID NO: 2348 - DNA, 179 bp, Homo sapiens; identical to SEQ ID NO: 1749

SEQ ID NO: 2349 - DNA, 179 bp, Homo sapiens; identical to SEQ ID NO: 1735

SEQ ID NO: 2350 - DNA, 179 bp, Homo sapiens; identical to SEQ ID NO: 1728

SEQ ID NO: 2351 - DNA, 179 bp, Homo sapiens; identical to SEQ ID NO: 1717

SEQ ID NO: 2352 - DNA, 179 bp, Homo sapiens; identical to SEQ ID NO: 1808

SEQ ID NO: 2353 - DNA, 179 bp, Homo sapiens; identical to SEQ ID NO: 1677

SEQ ID NO: 2354 - DNA, 179 bp, Homo sapiens; identical to SEQ ID NO: 1810

SEQ ID NO: 2355 - DNA, 179 bp, Homo sapiens; identical to SEQ ID NO: 1690

SEQ ID NO: 2356 - DNA, 179 bp, Homo sapiens; identical to SEQ ID NO: 1689

SEQ ID NO: 2357 - DNA, 179 bp, Homo sapiens; identical to SEQ ID NO: 1700

SEQ ID NO: 2358 - DNA, 179 bp, Homo sapiens; identical to SEQ ID NO: 1686

SEQ ID NO: 2359 - DNA, 179 bp, Homo sapiens; identical to SEQ ID NO: 1698

SEQ ID NO: 2360 - DNA, 179 bp, Homo sapiens; identical to SEQ ID NO: 1687

SEQ ID NO: 2361 - DNA, 179 bp, Homo sapiens; identical to SEQ ID NO: 1691

SEQ ID NO: 2362 - DNA, 179 bp, Homo sapiens; identical to SEQ ID NO: 1692

SEQ ID NO: 2363 - DNA, 179 bp, Homo sapiens; identical to SEQ ID NO: 1696

SEQ ID NO: 2364 - DNA, 179 bp, Homo sapiens
tgccagcaaggagtgcctgagttgtggggaatgcctgacacttgggctgcctaagtcttcagatcccagggagtttaaaaaaaaaaaccrcccaaagaaaaggtaattaactctggaggggtattttcatgtgtttgtgctattaaatcaacaggcacacacacatacaccacagacat

SEQ ID NO: 2365 - DNA, 179 bp, Homo sapiens; identical to SEQ ID NO: 1846

SEQ ID NO: 2366 - DNA, 179 bp, Homo sapiens; identical to SEQ ID NO: 1547

SEQ ID NO: 2367 - DNA, 179 bp, Homo sapiens
cttttcacttccctgggccacattgggccacacataaaatacaccaatgatagctgatgagctaaaataaaaatcccccccaaaatcttwttattattattattattattattatactttaagttttagggtacatgtgcacaatgtgcaggttagttacataagtatacatgtgccat

SEQ ID NO: 2368 - DNA, 179 bp, Homo sapiens
agtgctgggttggttagatacctggaggagaagccccaggtgagagctggaggatgctgttagagaggccacacccccggagtgaggccrgagacgggctcagagcaagaaaagctggcctttcctcctcctgctgctctgttcttcttaccaggctgtgaccacactctggcagaaag

SEQ ID NO: 2369 - DNA, 179 bp, Homo sapiens; identical to SEQ ID NO: 1919

SEQ ID NO: 2370 - DNA, 179 bp, Homo sapiens; identical to SEQ ID NO: 1910

SEQ ID NO: 2371 - DNA, 179 bp, Homo sapiens; identical to SEQ ID NO: 1932

SEQ ID NO: 2372 - DNA, 179 bp, Homo sapiens; identical to SEQ ID NO: 1909

SEQ ID NO: 2373 - DNA, 179 bp, Homo sapiens
gcctcagccccgtatgcacagctgccaaactggtgattcccacaggccgcccaggagctgcggtaattgagctccaggggctgcctcttkcctccctagcatagctccacctcacctgatgggaaggccagtgcagtccgagcacagaccaggcctggctgcggtgccgactgcccctg

SEQ ID NO: 2374 - DNA, 179 bp, Homo sapiens; identical to SEQ ID NO: 2121

SEQ ID NO: 2375 - DNA, 179 bp, Homo sapiens; identical to SEQ ID NO: 1794

SEQ ID NO: 2376 - DNA, 179 bp, Homo sapiens; identical to SEQ ID NO: 1928

SEQ ID NO: 2377 - DNA, 179 bp, Homo sapiens; identical to SEQ ID NO: 1818

SEQ ID NO: 2378 - DNA, 179 bp, Homo sapiens
acctaatatttagtccatattgaaattttacaaattacccaatactatcctttatactgttttttttttctgattcagtatccaaccagrattgagcattgcatttagttgtcatgtctctgtagtctcctttaatctgaactagcttctgactcagccttttgtcttgaatgactttg

SEQ ID NO: 2379 - DNA, 179 bp, Homo sapiens
ggttagctatgcatccgagctttgagatagcagattgaataaacaagccttcaatgcgtttgttaaaagcattgaacaagacagagccawggaagatccctctggtagaaaactcactttacatggcaacccacttcacatacccagcaagtttcgtgtgataatgtgctctgatgttt

SEQ ID NO: 2380 - DNA, 179 bp, Homo sapiens; identical to SEQ ID NO: 1945

SEQ ID NO: 2381 - DNA, 179 bp, Homo sapiens; identical to SEQ ID NO: 1957

SEQ ID NO: 2382 - DNA, 179 bp, Homo sapiens; identical to SEQ ID NO: 1867

SEQ ID NO: 2383 - DNA, 179 bp, Homo sapiens
atatggagaagagcattctaggaagaaaggaacatttgcatcttcggaggcccccaatgtggacaggagttttgttcttttagggaactwaaagagtgccagtagatgaatgagggggaaggtgatgtgaaatgatgctggagaagtaagcaggtgtgtcagtttattcatgtgtcctt

SEQ ID NO: 2384 - DNA, 179 bp, Homo sapiens; identical to SEQ ID NO: 1608

SEQ ID NO: 2385 - DNA, 179 bp, Homo sapiens; identical to SEQ ID NO: 1952

SEQ ID NO: 2386 - DNA, 179 bp, Homo sapiens; identical to SEQ ID NO: 1878

SEQ ID NO: 2387 - DNA, 179 bp, Homo sapiens; identical to SEQ ID NO: 2011

SEQ ID NO: 2388 - DNA, 179 bp, Homo sapiens; identical to SEQ ID NO: 2098

SEQ ID NO: 2389 - DNA, 179 bp, Homo sapiens; identical to SEQ ID NO: 1857

SEQ ID NO: 2390 - DNA, 179 bp, Homo sapiens; identical to SEQ ID NO: 1527

SEQ ID NO: 2391 - DNA, 179 bp, Homo sapiens; identical to SEQ ID NO: 1632

SEQ ID NO: 2392 - DNA, 179 bp, Homo sapiens; identical to SEQ ID NO: 1565

SEQ ID NO: 2393 - DNA, 179 bp, Homo sapiens; identical to SEQ ID NO: 1562

SEQ ID NO: 2394 - DNA, 179 bp, Homo sapiens; identical to SEQ ID NO: 1926

SEQ ID NO: 2395 - DNA, 179 bp, Homo sapiens; identical to SEQ ID NO: 1559

SEQ ID NO: 2396 - DNA, 179 bp, Homo sapiens; identical to SEQ ID NO: 1835

SEQ ID NO: 2397 - DNA, 179 bp, Homo sapiens; identical to SEQ ID NO: 1563

SEQ ID NO: 2398 - DNA, 179 bp, Homo sapiens; identical to SEQ ID NO: 1992

SEQ ID NO: 2399 - DNA, 179 bp, Homo sapiens; identical to SEQ ID NO: 1558

SEQ ID NO: 2400 - DNA, 179 bp, Homo sapiens; identical to SEQ ID NO: 1566

SEQ ID NO: 2401 - DNA, 179 bp, Homo sapiens; identical to SEQ ID NO: 1506

SEQ ID NO: 2402 - DNA, 179 bp, Homo sapiens; identical to SEQ ID NO: 1570

SEQ ID NO: 2403 - DNA, 179 bp, Homo sapiens; identical to SEQ ID NO: 1571

SEQ ID NO: 2404 - DNA, 179 bp, Homo sapiens; identical to SEQ ID NO: 1528

SEQ ID NO: 2405 - DNA, 179 bp, Homo sapiens
ttagctgtggaatggaggcagccttgtaatttctgagcgctgtggagaacagaatccatgtggctcccattctgagaaaggagtgttggrggcccaatcagccacaactcccagggaggttggcttcagcctgggccaacttcgggaccacttccttactgatggacctttccatggga

SEQ ID NO: 2406 - DNA, 179 bp, Homo sapiens; identical to SEQ ID NO: 1572

SEQ ID NO: 2407 - DNA, 179 bp, Homo sapiens; identical to SEQ ID NO: 1573

SEQ ID NO: 2408 - DNA, 179 bp, Homo sapiens; identical to SEQ ID NO: 1646

SEQ ID NO: 2409 - DNA, 179 bp, Homo sapiens; identical to SEQ ID NO: 1651

SEQ ID NO: 2410 - DNA, 179 bp, Homo sapiens; identical to SEQ ID NO: 1652

SEQ ID NO: 2411 - DNA, 179 bp, Homo sapiens; identical to SEQ ID NO: 1529

SEQ ID NO: 2412 - DNA, 179 bp, Homo sapiens; identical to SEQ ID NO: 1578

SEQ ID NO: 2413 - DNA, 179 bp, Homo sapiens; identical to SEQ ID NO: 1647

SEQ ID NO: 2414 - DNA, 179 bp, Homo sapiens; identical to SEQ ID NO: 1584

SEQ ID NO: 2415 - DNA, 179 bp, Homo sapiens; identical to SEQ ID NO: 1721

SEQ ID NO: 2416 - DNA, 179 bp, Homo sapiens; identical to SEQ ID NO: 1727

SEQ ID NO: 2417 - DNA, 179 bp, Homo sapiens; identical to SEQ ID NO: 1723

SEQ ID NO: 2418 - DNA, 179 bp, Homo sapiens; identical to SEQ ID NO: 1722

SEQ ID NO: 2419 - DNA, 179 bp, Homo sapiens; identical to SEQ ID NO: 1726

SEQ ID NO: 2420 - DNA, 179 bp, Homo sapiens; identical to SEQ ID NO: 1724

SEQ ID NO: 2421 - DNA, 179 bp, Homo sapiens; identical to SEQ ID NO: 1737

SEQ ID NO: 2422 - DNA, 179 bp, Homo sapiens; identical to SEQ ID NO: 1748

SEQ ID NO: 2423 - DNA, 179 bp, Homo sapiens
cccagggagtttaaaaaaaaaaaccacccaaagaaaaggtaattaactctggaggggtattttcatgtgtttgtgctattaaatcaacabgcacacacacatacaccacagacatgtggtttgattgcccatttgaatctggtagaggaacgtgggaggattttgtgcacagatcctat

SEQ ID NO: 2424 - DNA, 179 bp, Homo sapiens; identical to SEQ ID NO: 1627

SEQ ID NO: 2425 - DNA, 179 bp, Homo sapiens; identical to SEQ ID NO: 1764

SEQ ID NO: 2426 - DNA, 179 bp, Homo sapiens; identical to SEQ ID NO: 1732

SEQ ID NO: 2427 - DNA, 179 bp, Homo sapiens; identical to SEQ ID NO: 1720

SEQ ID NO: 2428 - DNA, 179 bp, Homo sapiens; identical to SEQ ID NO: 1716

SEQ ID NO: 2429 - DNA, 179 bp, Homo sapiens; identical to SEQ ID NO: 1713

SEQ ID NO: 2430 - DNA, 179 bp, Homo sapiens; identical to SEQ ID NO: 1658

SEQ ID NO: 2431 - DNA, 179 bp, Homo sapiens; identical to SEQ ID NO: 1712

SEQ ID NO: 2432 - DNA, 179 bp, Homo sapiens; identical to SEQ ID NO: 1701

SEQ ID NO: 2433 - DNA, 179 bp, Homo sapiens; identical to SEQ ID NO: 1697

SEQ ID NO: 2434 - DNA, 179 bp, Homo sapiens; identical to SEQ ID NO: 1403

SEQ ID NO: 2435 - DNA, 179 bp, Homo sapiens; identical to SEQ ID NO: 1694

SEQ ID NO: 2436 - DNA, 179 bp, Homo sapiens; identical to SEQ ID NO: 1532

SEQ ID NO: 2437 - DNA, 179 bp, Homo sapiens; identical to SEQ ID NO: 1530

SEQ ID NO: 2438 - DNA, 179 bp, Homo sapiens; identical to SEQ ID NO: 1718

SEQ ID NO: 2439 - DNA, 179 bp, Homo sapiens; identical to SEQ ID NO: 1561

SEQ ID NO: 2440 - DNA, 179 bp, Homo sapiens; identical to SEQ ID NO: 1680

SEQ ID NO: 2441 - DNA, 179 bp, Homo sapiens; identical to SEQ ID NO: 1954

SEQ ID NO: 2442 - DNA, 179 bp, Homo sapiens; identical to SEQ ID NO: 1859

SEQ ID NO: 2443 - DNA, 179 bp, Homo sapiens; identical to SEQ ID NO: 1531

SEQ ID NO: 2444 - DNA, 179 bp, Homo sapiens; identical to SEQ ID NO: 2074

SEQ ID NO: 2445 - DNA, 179 bp, Homo sapiens
gggatccttagggagttgttatctctccttccctcggacttcctgaaacagaagctcagcaattagacatctaataggcacctaggctcmgcaagcaagtgggggctttccttgggtttccagttttgctggcaactagctgtcgctttatttaactggcagtctgtgctgcatctgac

SEQ ID NO: 2446 - DNA, 179 bp, Homo sapiens; identical to SEQ ID NO: 1434

SEQ ID NO: 2447 - DNA, 179 bp, Homo sapiens; identical to SEQ ID NO: 1671

SEQ ID NO: 2448 - DNA, 179 bp, Homo sapiens; identical to SEQ ID NO: 1673

SEQ ID NO: 2449 - DNA, 179 bp, Homo sapiens; identical to SEQ ID NO: 1618

SEQ ID NO: 2450 - DNA, 179 bp, Homo sapiens; identical to SEQ ID NO: 1619

SEQ ID NO: 2451 - DNA, 179 bp, Homo sapiens; identical to SEQ ID NO: 1616

SEQ ID NO: 2452 - DNA, 179 bp, Homo sapiens; identical to SEQ ID NO: 1617

SEQ ID NO: 2453 - DNA, 179 bp, Homo sapiens; identical to SEQ ID NO: 1620

SEQ ID NO: 2454 - DNA, 179 bp, Homo sapiens; identical to SEQ ID NO: 1621

SEQ ID NO: 2455 - DNA, 179 bp, Homo sapiens; identical to SEQ ID NO: 1622

SEQ ID NO: 2456 - DNA, 179 bp, Homo sapiens; identical to SEQ ID NO: 1615

SEQ ID NO: 2457 - DNA, 179 bp, Homo sapiens; identical to SEQ ID NO: 1614

SEQ ID NO: 2458 - DNA, 179 bp, Homo sapiens; identical to SEQ ID NO: 1623

SEQ ID NO: 2459 - DNA, 179 bp, Homo sapiens; identical to SEQ ID NO: 1624

SEQ ID NO: 2460 - DNA, 179 bp, Homo sapiens; identical to SEQ ID NO: 1625

SEQ ID NO: 2461 - DNA, 179 bp, Homo sapiens; identical to SEQ ID NO: 1626

SEQ ID NO: 2462 - DNA, 179 bp, Homo sapiens; identical to SEQ ID NO: 1549

SEQ ID NO: 2463 - DNA, 179 bp, Homo sapiens; identical to SEQ ID NO: 1533

SEQ ID NO: 2464 - DNA, 179 bp, Homo sapiens; identical to SEQ ID NO: 1487

SEQ ID NO: 2465 - DNA, 180 bp, Homo sapiens; identical to SEQ ID NO: 1491

SEQ ID NO: 2466 - DNA, 179 bp, Homo sapiens; identical to SEQ ID NO: 1488

SEQ ID NO: 2467 - DNA, 179 bp, Homo sapiens; identical to SEQ ID NO: 1486

SEQ ID NO: 2468 - DNA, 179 bp, Homo sapiens; identical to SEQ ID NO: 1656

SEQ ID NO: 2469 - DNA, 179 bp, Homo sapiens; identical to SEQ ID NO: 2009

SEQ ID NO: 2470 - DNA, 179 bp, Homo sapiens
aatggtggtttccaggagctgggaggaggggaaattggggaggtacttgtcaaagtgtacaaacttccagttatgtgacatgaataaatyctagagctctacttatagcatagtccctatagttagcaataccgtgttgtctacctaaaaatttgccaagagaataaatcttaagtgtt

SEQ ID NO: 2471 - DNA, 179 bp, Homo sapiens; identical to SEQ ID NO: 1649

SEQ ID NO: 2472 - DNA, 179 bp, Homo sapiens; identical to SEQ ID NO: 1575

SEQ ID NO: 2473 - DNA, 179 bp, Homo sapiens
tagtagatgccactgatgccgacccagatccccctcactggaccattgtgcatcctgccccagctgctgtgagtactggctactaatggyttgcagcactacctcctcaagaaagctgaccttggctgagcataggccaccgctcacaggagatttaacctccccagggtggcctgttg

SEQ ID NO: 2474 - DNA, 179 bp, Homo sapiens
gagtgttactgttaacagattctaaaatgtgtcattggccaaactgaggtttgagtgtagagcactgagactttcctatccccagatccmaatctggaaatctctattatgccattagctgtagcctgttgtatctgaagactcaggccacctgcctcttgcagtaggagttttagggc

SEQ ID NO: 2475 - DNA, 179 bp, Homo sapiens; identical to SEQ ID NO: 1494

SEQ ID NO: 2476 - DNA, 179 bp, Homo sapiens
ccctctgcccgtgtgagggtgtccagggccaggcttatatccctctccagctttcaaggcaggatcagataatcatctcagtatcagtaycccttctcccttacacacacacacacacacacacacacatacacacacacactgcccacatgcggggtatgtgccaaggctttcctcac

SEQ ID NO: 2477 - DNA, 179 bp, Homo sapiens; identical to SEQ ID NO: 1436

SEQ ID NO: 2478 - DNA, 179 bp, Homo sapiens; identical to SEQ ID NO: 1439

SEQ ID NO: 2479 - DNA, 179 bp, Homo sapiens; identical to SEQ ID NO: 1442

SEQ ID NO: 2480 - DNA, 179 bp, Homo sapiens; identical to SEQ ID NO: 1552

SEQ ID NO: 2481 - DNA, 179 bp, Homo sapiens
tctcatcttgaattgtaatcctcttaatccccacatgtcaagggtgggtctaggtggaggtaattggatcacgggagtggttcccccatkctgttctctctcgagatctgatggctttataagcacctggcatttcctctgcttgcactcactctttcctgttgccctgtgaaaaaggt

SEQ ID NO: 2482 - DNA, 179 bp, Homo sapiens; identical to SEQ ID NO: 2300

SEQ ID NO: 2483 - DNA, 179 bp, Homo sapiens; identical to SEQ ID NO: 1554

SEQ ID NO: 2484 - DNA, 179 bp, Homo sapiens; identical to SEQ ID NO: 1553

SEQ ID NO: 2485 - DNA, 179 bp, Homo sapiens; identical to SEQ ID NO: 1540

SEQ ID NO: 2486 - DNA, 179 bp, Homo sapiens; identical to SEQ ID NO: 1648

SEQ ID NO: 2487 - DNA, 179 bp, Homo sapiens
agcattcgtggttcacgaaaatctgctgttctgcagccaccactgctgatacccaggcaaacagggtctggagtggaccgctagcaaacyccaacagacctgcagctgagggtcctgtctgttagaaggaaaactaacaaacagaaagacatccgcaccaaaaacccatctgtacatca

SEQ ID NO: 2488 - DNA, 179 bp, Homo sapiens
tgctaccagacaataaacagggtctccaaggagacacactggggctgtgaccagtccatgccaatccccctccacccaggctggtctctktcccttccccggcacttgcagctggccccctggcctgctccatgacacctaataggcaccagagacttgaaaccacactgctggtaggg

SEQ ID NO: 2489 - DNA, 179 bp, Homo sapiens
ggggtgggtggtctctggccctcagcctccttgtaccccacaccagctggtgtcccttgagtggagccctgggctcagtacagaatgaaygcggggctggggttcttcctaggagcatgcccagaggcagcagagctgcgcagccaagggcgggcaccttggctctgaggggcttgtct

SEQ ID NO: 2490 - DNA, 179 bp, Homo sapiens; identical to SEQ ID NO: 1465

SEQ ID NO: 2491 - DNA, 179 bp, Homo sapiens
ccaccattccagtccctcatccattctgctctgagctgggattttctagcatttggttaggaaaactggtcctcacatcttcagagggcmcttcttcactcctggtggtggtggtgtttgtatatctgacgctactacctaccttccctagaaattgctcattgtttcttgcccaccaa

SEQ ID NO: 2492 - DNA, 179 bp, Homo sapiens; identical to SEQ ID NO: 1908

SEQ ID NO: 2493 - DNA, 179 bp, Homo sapiens; identical to SEQ ID NO: 2312

SEQ ID NO: 2494 - DNA, 179 bp, Homo sapiens; identical to SEQ ID NO: 1535

SEQ ID NO: 2495 - DNA, 179 bp, Homo sapiens
attcacctctctgaattctgtgcatcctctgtggaggggtaccagtcccacctgttccaggcagtctcgcctggctgctctgggccacamtgacctcccaccagggaagctcagcccctaagttcaaccttacattcttcctgtcctgggcggatctctccctggccctctgaggcgaa

SEQ ID NO: 2496 - DNA, 179 bp, Homo sapiens
atccaacatataaacagaaccaaagacaaaaaccacatgattatctcaatagatgcagaaaaggcctttgacaaaattcaacaatgcttyatgctaaaaactctcaataaattaggtattgatgggacatatctcaaaataataagagctatctatgacaaacccacagccaatatcat

SEQ ID NO: 2497 - DNA, 179 bp, Homo sapiens
tccccacgctgctgcgggggtggggatttgggatctgcgtcccattcccaccctggttctaccttctcctgtgcgtcgtcgtgaggcttmgtttacaccgaaagcgagtgagttctgtagggtagtagcgcgcgcgcgcgcagcctgagtccggaaaccgaagggcaaagaccagctgg

SEQ ID NO: 2498 - DNA, 179 bp, Homo sapiens; identical to SEQ ID NO: 1502

SEQ ID NO: 2499 - DNA, 179 bp, Homo sapiens
gagaggaagaggaaaatacaaagaactccttgttgcttaggcaatatgtagaagtcaaatagtattatttaaagttgacaaaccaagtayatgaagtgtaagtaaggaaaaagggagatttagagcattaaaggtgtactatactattaatagtatagaatacatagtataattactag

SEQ ID NO: 2500 - DNA, 179 bp, Homo sapiens; identical to SEQ ID NO: 1504

SEQ ID NO: 2501 - DNA, 179 bp, Homo sapiens; identical to SEQ ID NO: 1507

SEQ ID NO: 2502 - DNA, 179 bp, Homo sapiens
tgctgcccaggctggagtgcagtggtgcgatcttggctcactgcaagctccgcctcctgggttcatgccattctcctgcctcagcctccygagtagctgggactataggcgcccaccaccacgcccggctaattttttgtatttttagtggagacggggtttcactgcattagccagga

SEQ ID NO: 2503 - DNA, 179 bp, Homo sapiens; identical to SEQ ID NO: 1513

SEQ ID NO: 2504 - DNA, 179 bp, Homo sapiens; identical to SEQ ID NO: 1512

SEQ ID NO: 2505 - DNA, 179 bp, Homo sapiens; identical to SEQ ID NO: 1514

SEQ ID NO: 2506 - DNA, 179 bp, Homo sapiens; identical to SEQ ID NO: 1515

SEQ ID NO: 2507 - DNA, 179 bp, Homo sapiens
tgcactcctgcctggtgacagagctagactccgtcaaaaaaaaaatttacttcctagatacaatagaggtacaggcattgggtaaatatrcctgttctaaaggggagacattggccaaaacaaaggggctacaggcctcatgcaagtccgaaatccaacaaggcagcaattaaatctta

SEQ ID NO: 2508 - DNA, 179 bp, Homo sapiens; identical to SEQ ID NO: 1871

SEQ ID NO: 2509 - DNA, 179 bp, Homo sapiens
cctggactccattgtccatatcactgtcagcattttggtcaaagccattcaaaaagtctctaggaagttccaaactttcccacattttcrtgtctgcaaaccattctgacctctgcctcttacccagttccaaagttgcttccacatttttaagtatccttatagcagcacccccttcc

SEQ ID NO: 2510 - DNA, 179 bp, Homo sapiens
gatattccccaaaaatggagtggagggccataccctgagggagggaagagatctccagggttggaagagtaatgccttttgtccttactkctcatcatatggataggaaggatataatttctgaagctccccatatagcctttgttaggcctgcttgtctgaggagggatcctaaaagg

SEQ ID NO: 2511 - DNA, 179 bp, Homo sapiens
ttctcaaagcacaaactcaggtatgcaagaaatgtaacttagttgaattcaatttatgcttcaagtcctcaccatgggaactgtctcttrttaagtcaatgttgggtactatttcaatatctgagtctgtgtctgagttttgtagggctcaaacctggaggagagttgagctggtcctt

SEQ ID NO: 2512 - DNA, 179 bp, Homo sapiens
ttgtgagaggcctgaaggtcctttcctgaggaaggaactcggataaaacaagtaagtttccagctttaactgcaaaagggtcaacttctrtaatcccagcactttgggaggctgaggcaggcaggtcacctgaagttgggagttcaagaccagcctggccaacatgatgaaaccctgta

SEQ ID NO: 2513 - DNA, 179 bp, Homo sapiens
cctgaaggtcctttcctgaggaaggaactcggataaaacaagtaagtttccagctttaactgcaaaagggtcaacttctataatcccagyactttgggaggctgaggcaggcaggtcacctgaagttgggagttcaagaccagcctggccaacatgatgaaaccctgtatctactaaaa

SEQ ID NO: 2514 - DNA, 179 bp, Homo sapiens
ccactgatctagaatgttctcacgctttcaaagaggtctacagttgtaagaagtaggggtaacggcttttgagtgcatatccatcccccsactctggatgcagggttggaggtgaggttctcctcaaagcctaggagattcctgcttagtgaaatctgctcagcacgtgagagtttggt

SEQ ID NO: 2515 - DNA, 179 bp, Homo sapiens; identical to SEQ ID NO: 1882

SEQ ID NO: 2516 - DNA, 179 bp, Homo sapiens
taagcacgtatgttattggttttaatagatactgaaaaatggttataccattttatttatttattttttgaggctacccaagtgatggcrgtgagggtagaagctgggtgatatggcagttggctctctgcggtaatctgtgaacatccttcctacctccacaccccaacccctgctga

SEQ ID NO: 2517 - DNA, 179 bp, Homo sapiens; identical to SEQ ID NO: 1786

SEQ ID NO: 2518 - DNA, 179 bp, Homo sapiens; identical to SEQ ID NO: 1679

SEQ ID NO: 2519 - DNA, 179 bp, Homo sapiens; identical to SEQ ID NO: 1490

SEQ ID NO: 2520 - DNA, 179 bp, Homo sapiens
gactggccctctactatacctccaccctctcccaatacatatagccactagacaggagtcctttgtcagataagtggtctttgagcttcygaatatctctaagggagtatgttctcctatccctttgggcccccagctatgcaattttctttatagtagatcttcataagatgaagttg

SEQ ID NO: 2521 - DNA, 179 bp, Homo sapiens
aggtgcgagccaccacacccagctaattaaaacaaaaaaatttgtagagatgggcaacttgctaaattgcccaggctgttcttgagctcytggtgatcctcctgccttggcctacccaaagtgctaggattataagcatgaaccactgtgcctggccagcactgatatttaaagatggc

SEQ ID NO: 2522 - DNA, 179 bp, Homo sapiens
gacaagttctctagagtagttttatgtataccaccattttattttattttaatgaggatgatccctttatttgacttgaggatggagaaraagaggattatgaggtcacgggaatgtctcatgaggaattacccaaagctggtaacaccaggtgctctgccaggaggactctctggaag

SEQ ID NO: 2523 - DNA, 179 bp, Homo sapiens
cttgtcttcattgcttgaattctttaaaatcagcttgcattatttttacagaaacaataaaactcatttgtccttttattttaaaaattwaaaaaaaaaacagtctggatgacagcagcttcttacagggcaaccctctccactgtgagcaatcagttccataaattgggaagccacct

SEQ ID NO: 2524 - DNA, 179 bp, Homo sapiens
tcttgaagatttcctgttcctagggataaggaagtggttagggctgtgcttggaagccagctcacctgagtgaatctgggccctggccaygcatttgtcttgtgtctttgggcagattgattgatgtttctctacctcagttttcccattcgtaaaatggggttaataataatatctat

SEQ ID NO: 2525 - DNA, 179 bp, Homo sapiens; identical to SEQ ID NO: 1733

SEQ ID NO: 2526 - DNA, 179 bp, Homo sapiens
ctcccagatggggtggtggccgggcagaggggctcctcacttcccagaaggggcggccgggcagaggcaccccccacctccctcccagayggggcggctggccgggcgggggctgaccccccacctccctcccggacggggcggctggccgggtttttttttgtttaatcaggggttgg

SEQ ID NO: 2527 - DNA, 179 bp, Homo sapiens; identical to SEQ ID NO: 1493

SEQ ID NO: 2528 - DNA, 179 bp, Homo sapiens; identical to SEQ ID NO: 1498

SEQ ID NO: 2529 - DNA, 179 bp, Homo sapiens; identical to SEQ ID NO: 2031

SEQ ID NO: 2530 - DNA, 179 bp, Homo sapiens
accatgttggtcaggctggtctcgagctcctgaccttgtgatccgcccaccttggcctcctaaagtgttgggattacaggcatgagccaytgtgcctggcctaggcaccgtttctgacaacacctcccttccggggagagcagaaacaggaactagatgagaatgccttccaagtgggg

SEQ ID NO: 2531 - DNA, 179 bp, Homo sapiens
atgtatctcctttcaaattctgagttgaacatgaaattctcagtgtgtaccagcccctcccctaaatggaaaactgactagtatctgcarcaccaaagactacaggcaactcagatgaggcaccaaggatgaaaactgtggactttctccttaaaaatgtcaccactgtgcagcctggg

SEQ ID NO: 2532 - DNA, 179 bp, Homo sapiens; identical to SEQ ID NO: 2327

SEQ ID NO: 2533 - DNA, 179 bp, Homo sapiens; identical to SEQ ID NO: 2088

SEQ ID NO: 2534 - DNA, 179 bp, Homo sapiens
gcaccagagacttgaaaccacactgctggtagggtctcgtgtggagggaaggcaggagaggtgggccccagacctcaaagccttttaacygcagtcaggcgaggggccctgtcctcagtcacataggagagaaatgggcatttataaattgctcctcagggggagggcaaggccagagt

SEQ ID NO: 2535 - DNA, 179 bp, Homo sapiens
cttctctgcttagggtacatagtagctatgttagcttgcaggcatcctggacatgtgtcagtgggtggttctgattgtgggccatctctytttttttttttagaagccttgactagcacaggtacagcctcaacattcagtgtctgactcatctcaaccatgaactactgaacagaggc

SEQ ID NO: 2536 - DNA, 179 bp, Homo sapiens; identical to SEQ ID NO: 2035

SEQ ID NO: 2537 - DNA, 179 bp, Homo sapiens; identical to SEQ ID NO: 2039

SEQ ID NO: 2538 - DNA, 179 bp, Homo sapiens
gcaagtaatagcaagatggctgcacaggacctagaaaggggagaagccacgtcacccaactccagaggttggtataagagtttgaaaggyggccagacgcagtggctcacgcctgtaatcccagcactttgggaggccgaggcaggcagatcacaaggtcaggagatcgagaccaacct

SEQ ID NO: 2539 - DNA, 179 bp, Homo sapiens; identical to SEQ ID NO: 2044

SEQ ID NO: 2540 - DNA, 179 bp, Homo sapiens; identical to SEQ ID NO: 2045

SEQ ID NO: 2541 - DNA, 179 bp, Homo sapiens; identical to SEQ ID NO: 2050

SEQ ID NO: 2542 - DNA, 179 bp, Homo sapiens; identical to SEQ ID NO: 1376

SEQ ID NO: 2543 - DNA, 179 bp, Homo sapiens; identical to SEQ ID NO: 2042

SEQ ID NO: 2544 - DNA, 179 bp, Homo sapiens; identical to SEQ ID NO: 2053

SEQ ID NO: 2545 - DNA, 179 bp, Homo sapiens; identical to SEQ ID NO: 1417

SEQ ID NO: 2546 - DNA, 179 bp, Homo sapiens; identical to SEQ ID NO: 2075

SEQ ID NO: 2547 - DNA, 179 bp, Homo sapiens; identical to SEQ ID NO: 2090

SEQ ID NO: 2548 - DNA, 179 bp, Homo sapiens; identical to SEQ ID NO: 2080

SEQ ID NO: 2549 - DNA, 179 bp, Homo sapiens
ataggtgtggacattggttcccctatgataggaacctctcaccctgggataagtttttatgataagagtagtgactccatgattcccacycctagccctccctgcctcctggcctcatccatcttccatatcgattgtagtagccttccaggagagcagcctagccattggcccactga

SEQ ID NO: 2550 - DNA, 179 bp, Homo sapiens
caggaagcaagtgcatttctggtcctagttttggttcacatcttctgtgatctgttgatcagcttgtgcctggctcagaagtccttgaartcatgaggtggaggtggcctgaatactcattggaaaaaacagagttcccaagacagaggcactggaagatgggaagagaggttgcctga

SEQ ID NO: 2551 - DNA, 179 bp, Homo sapiens
gcaagagacagctggaaacctggggtgaaatctttcattgtttcattttgaaactcactttgatctcctttggggaattgccagtggctyacacataaacagccagagccacctctagatttctgcagggttagaagaggcatcctaggaatcgtgacaagatgcccctggccgcccct

SEQ ID NO: 2552 - DNA, 179 bp, Homo sapiens; identical to SEQ ID NO: 1654

SEQ ID NO: 2553 - DNA, 179 bp, Homo sapiens
tcagtttacaagaggcagtgagaagctagaacttgggcttataattaaccttttctttctcacagaaagttgagaggggaggtgaggatytacttggtcccaaagcagttgccgccaaaatcaaagccttcagtagtgctttgaaagggtgtagagaggagtttcacccgcctccttgg

SEQ ID NO: 2554 - DNA, 179 bp, Homo sapiens; identical to SEQ ID NO: 1659

SEQ ID NO: 2555 - DNA, 179 bp, Homo sapiens
actcatccttttttatgactgcatagcattccatggtgtatatgtgccacatttattcccttctatttcaacttttctaagaatttaaarttataaatggaaattaaactttatcaaatgattttagcatcaattaagaagactatgtgatccttttcctttaatctattaataaaaat

SEQ ID NO: 2556 - DNA, 179 bp, Homo sapiens
agctagttttgtatttttagtagagacggggtttcaccgtgttggccaagctggtctcgaacttctgacctcaaatgatccacctgcctyggcctcccaaagtgctgggattgcaagtgtgagccaccgtgcctggccattgttcttggttttccaacgtggaatcacactagagcatc

SEQ ID NO: 2557 - DNA, 179 bp, Homo sapiens; identical to SEQ ID NO: 1479

SEQ ID NO: 2558 - DNA, 179 bp, Homo sapiens
cttgatcctgtcagctgaggaggatatatcgcctcaggaccctgtaataattgcattaactgcacaaattgtacagcatgtgtgtttgarcaatgtgaagtgtgggcaccttgaaaaaagaacaggataacagcaattgttcagggaataagagagataaccttaaactctgactgctg

SEQ ID NO: 2559 - DNA, 179 bp, Homo sapiens
aagtgatcctcctgcctcagtctcctaagtaactgggactacaggtgcacaccaccacgcccagctagttttgtatttttagtagagacrgggtttcaccgtgttggccaagctggtctcgaacttctgacctcaaatgatccacctgcctcggcctcccaaagtgctgggattgcaag

SEQ ID NO: 2560 - DNA, 179 bp, Homo sapiens; identical to SEQ ID NO: 2130

SEQ ID NO: 2561 - DNA, 179 bp, Homo sapiens
tcctcctacctctctggctgctccttttcagccttctctgcagacttctcctgctttgatggttggagtatttctgggctcctgactcarcccccttccttcttaccctctacaccacgttagaatcacctgggtgcttccaaaactcccgatgcccaggcctcatcccagggtcaaat

SEQ ID NO: 2562 - DNA, 179 bp, Homo sapiens
actttaatctcttgatcctgtcagctgaggaggatatatcgcctcaggaccctgtaataattgcattaactgcacaaattgtacagcatrtgtgtttgagcaatgtgaagtgtgggcaccttgaaaaaagaacaggataacagcaattgttcagggaataagagagataaccttaaact

SEQ ID NO: 2563 - DNA, 179 bp, Homo sapiens
gtctcctttatgagcttatttccatacagccatagttttgttcctttgtaccttatatgcaaagggtgtatacaagaaccaaagtttgtyagaagtcatctttgtggtgctgcgtatgatggccaggttacttttcctgcatttgggcactgagggtgttcttgttttttttgtttgtt

SEQ ID NO: 2564 - DNA, 179 bp, Homo sapiens; identical to SEQ ID NO: 1807

SEQ ID NO: 2565 - DNA, 179 bp, Homo sapiens
agaagaatgtggattgtgaagatttcatggacatttattagttccccaaattaatacttttataatttcttacacctgtctttactgcartctctaaacataaattgtaaagatttcatggacacttatcacttccccaatcaatacccttgtgatttcctatgcctgtctttacttta

SEQ ID NO: 2566 - DNA, 179 bp, Homo sapiens; identical to SEQ ID NO: 1424

SEQ ID NO: 2567 - DNA, 179 bp, Homo sapiens
catctcaaaaaataaaaataaaaataaaaaaatgctgttattctaagagtaacccagttaaggagtgtgtgtgtgtgtgtgtgtgtgtgygcgcgcgcgcgtgcgcgcatgtgcatgtttggtggggtatggtaccttgcttttttctccatgttgtgattactcattgaaacctcagc

SEQ ID NO: 2568 - DNA, 179 bp, Homo sapiens; identical to SEQ ID NO: 1421

SEQ ID NO: 2569 - DNA, 179 bp, Homo sapiens
taatgtctgattatgagatgtgaacagactctggaatgtattcaaaagctgcctctttagctacacaacagaaaggtccagccatttcarcctcagaaaagagtgcttttcccatataaatggggcaggcaccatggagttctacagcacgagatgcgaagtctatagaaagcattcat

SEQ ID NO: 2570 - DNA, 179 bp, Homo sapiens
agggctgggtaaaggcttttcctctgggtgagatgaggctgctagagggctttcagtgagcgtgatccgacttgattttaataggaccaygctggctgctgtgttgagagcccgctggggacaaggaccagtgaggaggccactgcaagaatccaggagagagatgatggcggctcaga

SEQ ID NO: 2571 - DNA, 179 bp, Homo sapiens
acagagaagaaagttgagtttgcctgagtaagccaagtgaaaagcccacaggatagctggagaagggaaatggctagaaggtcaggagcscagagagctaattttaaaggatagggaattatggaagccctggggatgttttcttctcttagtctctgatgggggcttgtatttgcttc

SEQ ID NO: 2572 - DNA, 179 bp, Homo sapiens
tggttataggaggcaggacttgggaaaaaaaaggcagcagagtgtgttactgaagtggggatagccctggggtacctcctagctgcctasctcctagctgcctacctcctagctgcatggcatcaggccagctatttctctaattcttagtctcatctgtgcaatggggaaggtggctg

SEQ ID NO: 2573 - DNA, 179 bp, Homo sapiens
agttcgcagtgagccgagatcatgccattgcactctagcctgggcaacaagagcgaaactccatctcaaaaaaaaaaaaaaaaaaaaaaraaaaagaaaaaagaaatgagcaaaagatctgactagacatttctcaaaacaagacgtacaaatggcaaacaggcatgtgaaaaagtgct

SEQ ID NO: 2574 - DNA, 179 bp, Homo sapiens
aggacagggcagatgagctagaggagagggtcttactccaaaggaagaaaccacaggtgggagagctccaggaatgagagcttgaggtamacccataaaatctcccacagagtcatctttaaacattggcgaggctcagagagccggaggtcaactcacaacagtgacagctggaaaga

SEQ ID NO: 2575 - DNA, 179 bp, Homo sapiens; identical to SEQ ID NO: 1419

SEQ ID NO: 2576 - DNA, 179 bp, Homo sapiens
gtaagtctccaacccgcccaccagctgctttcctttgcggcactctgttcttctgcaacctagccttagcacctgctgcattcatgtacrtgctcattcagtcgtctactgtccctctccctcctagacagcaggctctggggagcaagggccaccaatgttttgttctcctttgtgtc

SEQ ID NO: 2577 - DNA, 179 bp, Homo sapiens
agaagccgttgatgccgcagcgagctggccgggtagcgctgtgcgcccgcgggcggcggcctacctggaggggccagtcgtggcggcacycttccagcctgttgggacggcgcgtggtcccccagcgacgccacgcctcctccggcgttcgattggtcatcgtgcccgggccgccgggc

SEQ ID NO: 2578 - DNA, 179 bp, Homo sapiens
ccctctccagctttcaaggcaggatcagataatcatctcagtatcagtaccccttctcccttacacacacacacacacacacacacacayacacacacacactgcccacatgcggggtatgtgccaaggctttcctcactaggcagatggttaacaagccccccaaccagtctttattc

SEQ ID NO: 2579 - DNA, 179 bp, Homo sapiens
ccgtcagtaggaccccacccaactccctagcagcctgtcctgcctttctggtaacacggtgctgcctctgtgccctgcgggcttcgggcrcccctcttttagccctggtggctcactgaacggcaatgtccatctgtctcccatcacaaggcagcgcttcaagtaccagagctgtgctt

SEQ ID NO: 2580 - DNA, 179 bp, Homo sapiens
tctctgggacccaagtgggcagctgcttggtgatctggacttcctgccataggggctgttagttcttggagccctggctgggtgtgtgcyctcagggagcgtttggttggaggcatcaaggaggtttgcttcctgtgctccttaccagctgtggattgagtgctttgtgtgatgctttg

SEQ ID NO: 2581 - DNA, 179 bp, Homo sapiens
tccttttggccagcaaatgccatctagccttctgaacagctcctgtggccctagctgggttgtgattgatatgaaggagcatcccagtgmcctgaaaatttgagccttcaaggagggctgggagaaaaatacacttttgtaggtgcagagcaggtattggtaaaggtcatatctagtgg

SEQ ID NO: 2582 - DNA, 179 bp, Homo sapiens
tgggctcagaattgtttcactgaggggtaaggatactagggttttatctaccagtcctgtcccttattggttgacggttgtcctgggatyttaactctacagaacttacttcagtggccagagaaagccctgggcagacagaggcaggaagtcacatgtaggaagtgtctgctggtgac

SEQ ID NO: 2583 - DNA, 179 bp, Homo sapiens; identical to SEQ ID NO: 1789

SEQ ID NO: 2584 - DNA, 179 bp, Homo sapiens; identical to SEQ ID NO: 1611

SEQ ID NO: 2585 - DNA, 179 bp, Homo sapiens; identical to SEQ ID NO: 1819

SEQ ID NO: 2586 - DNA, 179 bp, Homo sapiens
ggagttcagttggtttcttttatttaatcccagcaggaacacattctgcaggattataacaaaaatacatataaaaaaatcattccacawgcccatatttactttttggtaacttcccagagatacactgcaagcatggagccaagaacaaggccaagcggaatcactgcgcacttgct

SEQ ID NO: 2587 - DNA, 179 bp, Homo sapiens
aatgtgtctatgtaggttcttcagtagtaacaaatgtatctctctagtgggggacgttgataatggtggaggctgtgcatgcaggggctrtatggggaatctttgtaccttcctctcaattttgctgcaaacctataactggtctaaaaataaagtctatttttaaaaaagccttttcc

SEQ ID NO: 2588 - DNA, 179 bp, Homo sapiens
ttgcagggagcagtggtgtgaacaggctgccttgtactacaggccttggctggacccaggcagaggtgagtgagacttgaacacccagastcagggaagagccagggcacacagccctctggatcccaccagtcaggacctgggtcccatggtgggcaatgacaggagctgtctatctg

SEQ ID NO: 2589 - DNA, 179 bp, Homo sapiens; identical to SEQ ID NO: 1676

SEQ ID NO: 2590 - DNA, 179 bp, Homo sapiens; identical to SEQ ID NO: 2008

SEQ ID NO: 2591 - DNA, 179 bp, Homo sapiens
ttattgtggtaggggtcacagctagggcacagagcccagtagggacattacccctgctcctgtccctgccaaaaacccccacttcctttygttctttcctggtatgtgcacttgctgagacatatatggctcttcgagtgtcaattttaggatcaaagcatgacctaagtgataccaaa

SEQ ID NO: 2592 - DNA, 179 bp, Homo sapiens
gtcatgctgcttctggctctcacatgccaagcaggtaagctattccacgcctggcctctgccacccatggggcggtgtgaaaaccaaacraggtagagagcaccgtcgaatgtggggagactaccgtacaggagggagggaattatttgttatttgtaagaggaaatcccacttgagca

SEQ ID NO: 2593 - DNA, 179 bp, Homo sapiens
gatacggctagtggtgtgccaggaactatcacacatggtaaatgcgaccctatgctcctgagatgcaaaacaaacagaaagtctgcaggrttttgtttttaagaagtctgaaagcttctacagttcagtttgcatgggcttccccataaccctcagtgtagcagctaaaccacaagtgg

SEQ ID NO: 2594 - DNA, 179 bp, Homo sapiens
atggagtgagaccctgtctcaaaaaaataaaacaaaaataaatagaaacaaaaaaataataaaatgcaatccttctctagaaacaaaaakaaacataaaaactcttcaacacagaatataaaaccctacagagccagccctgtacaccattcctcctcacattatcccactcctctcat

SEQ ID NO: 2595 - DNA, 179 bp, Homo sapiens; identical to SEQ ID NO: 1785

SEQ ID NO: 2596 - DNA, 179 bp, Homo sapiens
ccttcccttctgaattgtataccccaccccccaactcaccaaaatttatatgttgaagccctaatgcccaacgtgatgatatttggagayaaggcctttggaagataacttggttgagatgaggtcatgagggtggggcacccgcgctgggattagtgcccttacaagaagagatggca

SEQ ID NO: 2597 - DNA, 179 bp, Homo sapiens
ataatggctgtatttaataaacagcttgcaaaatttctgaaaatgtaacaatgagctcttgtgagctggcacaagctggctccagcataycacaccaagggagtaaagagggaggctgaaccagagggggccctagtgctggtggcattgtctgccctagtctgggctgctatgcagaa

SEQ ID NO: 2598 - DNA, 179 bp, Homo sapiens; identical to SEQ ID NO: 1564

SEQ ID NO: 2599 - DNA, 179 bp, Homo sapiens
aaatttacaagaaaaaaacaaccccatcaaaaagtgggtgaaggatatgaagagatacttctcaaaagaagacatttatgcagccaaaakacatgaaaaaatgctcatcatcactggccatcagagaaatgcaaatcaaaaccacaatgagataccatctcacaccagttagaatggca

SEQ ID NO: 2600 - DNA, 179 bp, Homo sapiens
acaaaatgagaccgtgcagatgtgattaaattaaggatctcccctggcctccgcgagacagggtctagctctgtcactggggctggagtrcaatggtattaccacagcttaccgcagtcttgaaatcttgggctcaagagatcctcctgcctcagcctcctgagtaactaggactacag

SEQ ID NO: 2601 - DNA, 179 bp, Homo sapiens
gaggtcaggagtttgagaccaacctggccaacatggtgaaatcccgtctctactaaaatacaaaaattagccggggatggtggcagccayctgtaatcccagctactcaggaggctgaggcagggagaattgttcgaatccaggaggtggaagttgcagtgagccgaggttggcccact

SEQ ID NO: 2602 - DNA, 179 bp, Homo sapiens
acactgttggtgggactgtaaactagtttaatcattgtggaagtcagtgtggtgattcctcagggatctagaactagaaataccatttgwcccagcaatcccattactgggtatatagccaaaggattataaatcatactgctataaagacacatgcacacgtatgtttattggggcac

SEQ ID NO: 2603 - DNA, 179 bp, Homo sapiens
tttagcccaggccggattgcagtggcgcaatctcggctcactgtaagctccgcctcccaggttcacgccattctcctgcctcagcctccygagtagctgggactacaggcgcccgccaccgtgcccggctaattttttgtatttttagtagagacggggtttcaccgtgttagccaaga

SEQ ID NO: 2604 - DNA, 179 bp, Homo sapiens
gctaagcatctactggggagcccaggtgactcctaaaatatgcaagcaatgatgctaagagtgaatattcattgagcccttcctaggtascagaatttgctctccgtgtccatcagcgaattcagttttcccaacaaccatatgtgatggggactttgtttccattttaggtgatgaga

SEQ ID NO: 2605 - DNA, 179 bp, Homo sapiens; identical to SEQ ID NO: 1893

SEQ ID NO: 2606 - DNA, 179 bp, Homo sapiens
gcctcctctctggtctcgtgacatgtgagcccaaagaaaaaagctctgtgcctgtgttgtagaaggagtttcttactcctgtcttattcytttagttcaatatcttaggcccaattccttctagactcacttaaagagggtggacgtgatgcctcagataacaacccatctgtagctga

SEQ ID NO: 2607 - DNA, 179 bp, Homo sapiens; identical to SEQ ID NO: 1672

SEQ ID NO: 2608 - DNA, 179 bp, Homo sapiens
ctcttctgtcttaggatgggtcccttagagctataccttaagattagtgtaaatcagacatagggcagcccttgaaggaactggcacctracttccagttttctcaatccttagaaattggtttgaggcaatctcaggttgctatcattcccccaggaaccagacagaatcaaatatta

SEQ ID NO: 2609 - DNA, 179 bp, Homo sapiens; identical to SEQ ID NO: 1641

SEQ ID NO: 2610 - DNA, 179 bp, Homo sapiens
acttcgacctctttggctggttgaagcacgagccatctcttgctttcacagagctttcctagcttcacagttgtggccactcacagtacrgtatttctgaatgacagtcttatccacggagtcatggttgtcaaaggttacaaaggcaaagcccttttttttgccactgcctcagtcag

SEQ ID NO: 2611 - DNA, 179 bp, Homo sapiens
gacaaaaaccaaacaccacatgttctcactcaaggtgggaactgaacaatgagaacacagggacacaggaaggggaacatcacacactgrggcctgctgtagggtgggaggagggggaaaggatagcatttggacatatacctaatgttaaacgatgagttattgggtgcagcacacca

SEQ ID NO: 2612 - DNA, 179 bp, Homo sapiens
cccacgacccagctcagcaccttgcaggagctctggagcttctgctacatccctgagggcttctgtggctgccaaacagtgctgggttgsttagatacctggaggagaagccccaggtgagagctggaggatgctgttagagaggccacacccccggagtgaggccagagacgggctca

SEQ ID NO: 2613 - DNA, 179 bp, Homo sapiens
tgggggcaaaagggattgggtgtaggaaaagttagtgtgtatgtggggggtgttcagtgaggggagggccctgggaggtaatgtcctttkgggcacatcgggggacctgctagagaagccagtccaggcatagccagaataaagagtggaagaagtaaggtgaaggaaggaggatggat

SEQ ID NO: 2614 - DNA, 179 bp, Homo sapiens
cttggatttctttcttggttctagactttgaagagggaagatgatccggcttgtgccactgggcatgtgggtgtcaaagatgttgcctgycatttggatgctggtcaggagctaggatggtccaagacctatgggtcctggagtgcagccatctgcaggtgctgcttggactctgcttt

SEQ ID NO: 2615 - DNA, 179 bp, Homo sapiens; identical to SEQ ID NO: 2186

SEQ ID NO: 2616 - DNA, 179 bp, Homo sapiens; identical to SEQ ID NO: 2185

SEQ ID NO: 2617 - DNA, 179 bp, Homo sapiens; identical to SEQ ID NO: 2173

SEQ ID NO: 2618 - DNA, 179 bp, Homo sapiens; identical to SEQ ID NO: 2177

SEQ ID NO: 2619 - DNA, 179 bp, Homo sapiens
gtcctggactttttttggttgttaagctattgattattgcctcaatttcagagcctgttattggtctattcagagattcaacttcttccyggtttagtcttgggagggtgtatgtgttgaggaatttatccatttcttctagattttctagtttatttgcataaaggtgtttatagtat

SEQ ID NO: 2620 - DNA, 179 bp, Homo sapiens; identical to SEQ ID NO: 2182

SEQ ID NO: 2621 - DNA, 179 bp, Homo sapiens; identical to SEQ ID NO: 1675

SEQ ID NO: 2622 - DNA, 179 bp, Homo sapiens
tatttcaacttttctaagaatttaaaattataaatggaaattaaactttatcaaatgattttagcatcaattaagaagactatgtgatcyttttcctttaatctattaataaaaatataacgtattttctgttgtggcatgcattactgttatgattagcaaaaaaaaaaaaaaaaaaa

SEQ ID NO: 2623 - DNA, 179 bp, Homo sapiens; identical to SEQ ID NO: 1798

SEQ ID NO: 2624 - DNA, 179 bp, Homo sapiens
ggccaggggcctaggcagaagcattagctctaagggcatatccaggaaaacagagccacatgctaccctgttcctccagtggatacacarggaccatgccccacatctccagctcttcacaaccctctccagggtttctactccacccgagtttgtgcacagaaatggagaaagttaag

SEQ ID NO: 2625 - DNA, 179 bp, Homo sapiens; identical to SEQ ID NO: 2134

SEQ ID NO: 2626 - DNA, 179 bp, Homo sapiens; identical to SEQ ID NO: 1802

SEQ ID NO: 2627 - DNA, 179 bp, Homo sapiens
tccactttgtgctttccaccataagttgaagcagcgcgagaccctcgccagctgggctacccagtcttggacttttcaacctccagaatygtgagccaaataaacttcttttctttataaattacccagtttcaagtattctgttacaccagtgctaaatggaatgaggcactgaacta

SEQ ID NO: 2628 - DNA, 179 bp, Homo sapiens; identical to SEQ ID NO: 2165

SEQ ID NO: 2629 - DNA, 179 bp, Homo sapiens
ctggctcggcaccatagaaatgaaaggcaagcctttgttttctgtagctaccaagttgtagtttcttcacttgaggagaaacttgaatgwtgagggatggattcatagtgagtagcaaacatttccacctacattccagctactctgatcttgtcctgaactcctttgattgtgtagag

SEQ ID NO: 2630 - DNA, 179 bp, Homo sapiens
aacctggtatggtggtcacctttgctccagccaacattacaatgaaataaaatctgtcaaaatgcaccatgaagctttgagtgaagctcytcctggggacaatgtgggcttcaatgtcaagaatatgtctgtcaaggatgttcatcgtggcaattgacagcaaaaatgacccaccaatg

SEQ ID NO: 2631 - DNA, 179 bp, Homo sapiens; identical to SEQ ID NO: 2131

SEQ ID NO: 2632 - DNA, 179 bp, Homo sapiens
gtgagctacgattgcaccactgcactctggcctgggcaacagagtgagaccctatctgtaaaaaaaggaaaaaaaaaaaaacagaaaaaraaaaaagaaaaaaaaaaggtgtccatgacataatggaagaaagcagtttagctgaacctcacatgtaatgtatgtataccatttatgta

SEQ ID NO: 2633 - DNA, 179 bp, Homo sapiens
cctgtattcagccctcacctccgggggcgtgggctgggggcgcggtgggcgcccggctcgccgaacttgggggcacgatcttgtctgtgyagtcatctgcgggattctggttcctagaggcgcccctgcgatgggggccgggacgcggagcctcagggtcggagttcgggctacgcggg

SEQ ID NO: 2634 - DNA, 179 bp, Homo sapiens; identical to SEQ ID NO: 1795

SEQ ID NO: 2635 - DNA, 179 bp, Homo sapiens; identical to SEQ ID NO: 2138

SEQ ID NO: 2636 - DNA, 179 bp, Homo sapiens; identical to SEQ ID NO: 2091

SEQ ID NO: 2637 - DNA, 179 bp, Homo sapiens; identical to SEQ ID NO: 1550

SEQ ID NO: 2638 - DNA, 179 bp, Homo sapiens; identical to SEQ ID NO: 2073

SEQ ID NO: 2639 - DNA, 179 bp, Homo sapiens
ctgaccacaaggcacaggaacattcttatcataccctacccggcaaaggcccagctaaaggaacatccctatacaccctgctgcgcaaasatccaaagaacatcactatcacattctgccgcaaaaagggccatactgcacacacccctcccacccatacctataagtaccccagcctg

SEQ ID NO: 2640 - DNA, 179 bp, Homo sapiens; identical to SEQ ID NO: 1738

SEQ ID NO: 2641 - DNA, 179 bp, Homo sapiens; identical to SEQ ID NO: 1775

SEQ ID NO: 2642 - DNA, 179 bp, Homo sapiens; identical to SEQ ID NO: 1774

SEQ ID NO: 2643 - DNA, 179 bp, Homo sapiens
cttctctgaagtccagagaacagagtgattaggtgctggcgccccatgcagtgtgctgcccaaatgatgcccctctcaggcccaagcccrgtaagtccctcattacgctgcatcactccaatggctctcctctgcaggctggagcttttttcagctgtggtttatataatttaatgcta

SEQ ID NO: 2644 - DNA, 179 bp, Homo sapiens; identical to SEQ ID NO: 1683

SEQ ID NO: 2645 - DNA, 179 bp, Homo sapiens; identical to SEQ ID NO: 1682

SEQ ID NO: 2646 - DNA, 179 bp, Homo sapiens; identical to SEQ ID NO: 1788

SEQ ID NO: 2647 - DNA, 179 bp, Homo sapiens; identical to SEQ ID NO: 1947

SEQ ID NO: 2648 - DNA, 179 bp, Homo sapiens
caggtaaagtgtgtcaaatagtttatagcaatgtgaatatctttgtctgagacatgcactcaccgggtccttttgatccccaccattccrtgttgtgttatgtttattaaattacctgcctggctctgccggcatttgcgattttctctcttggattaggaccaagcagcaccaagagg

SEQ ID NO: 2649 - DNA, 179 bp, Homo sapiens; identical to SEQ ID NO: 1644

SEQ ID NO: 2650 - DNA, 179 bp, Homo sapiens; identical to SEQ ID NO: 2209

SEQ ID NO: 2651 - DNA, 179 bp, Homo sapiens; identical to SEQ ID NO: 1613

SEQ ID NO: 2652 - DNA, 179 bp, Homo sapiens
agatatcaatggtgataccatgttcacgctcagctttcagcttatccaagacccaggcatacttgaaggagccttttccatctcaacagsctccatctcaaatttttcagtggttcttttgtcgatgccaccgcatttgtagatcagatgaccagtagtggtggacttgcccaaatcta

SEQ ID NO: 2653 - DNA, 179 bp, Homo sapiens; identical to SEQ ID NO: 1642

SEQ ID NO: 2654 - DNA, 179 bp, Homo sapiens; identical to SEQ ID NO: 2211

SEQ ID NO: 2655 - DNA, 179 bp, Homo sapiens
aggccgcttaccggatttgaaattggtgagatgtttcttgggctcatcggtctgaggacctgaggtcgtaggtggtttcatgtgcgtccrtgtgaagagaccaccaaacaggctttgtgtgagcaataaagctgtttatttcacctgggtacaagtgggctgagtctgaaaagagagtc

SEQ ID NO: 2656 - DNA, 179 bp, Homo sapiens; identical to SEQ ID NO: 1996

SEQ ID NO: 2657 - DNA, 179 bp, Homo sapiens; identical to SEQ ID NO: 1579

SEQ ID NO: 2658 - DNA, 179 bp, Homo sapiens
gctcaaatgtgaccaaagtgcgcctactctgatcatcctatttaaaagtggtaacctgcaccttcccctccaccccaccccttcccttcycaagttctctttgctccatggtagataccactttttcacataatgtaaaagtggcttattgattatgctgattgtttgtagccaccttc

SEQ ID NO: 2659 - DNA, 179 bp, Homo sapiens; identical to SEQ ID NO: 1500

SEQ ID NO: 2660 - DNA, 179 bp, Homo sapiens; identical to SEQ ID NO: 1606

SEQ ID NO: 2661 - DNA, 179 bp, Homo sapiens; identical to SEQ ID NO: 1765

SEQ ID NO: 2662 - DNA, 179 bp, Homo sapiens; identical to SEQ ID NO: 1577

SEQ ID NO: 2663 - DNA, 179 bp, Homo sapiens; identical to SEQ ID NO: 1800

SEQ ID NO: 2664 - DNA, 179 bp, Homo sapiens; identical to SEQ ID NO: 1639

SEQ ID NO: 2665 - DNA, 179 bp, Homo sapiens; identical to SEQ ID NO: 1776

SEQ ID NO: 2666 - DNA, 179 bp, Homo sapiens
agatggtgtcttgggctggattctcaagaagcagaccctgagatgagggcatcatgtaagcagtttatttagggagatgctcctaatgasacccagaaataaatgggacaggataggaaagaggagaagggaagcaagggtgagatttcagggaccatcttagctccaccctgatcttg

SEQ ID NO: 2667 - DNA, 179 bp, Homo sapiens; identical to SEQ ID NO: 2171

SEQ ID NO: 2668 - DNA, 179 bp, Homo sapiens
aggttccatgcagacaggttgactttgcagtagcaaacatcaggactgggttggatcacacacctggcagaagtatttctcccaaatgtkattggtctgtttagttgctttctgaatgcaacttttggaggaattagaagactactcttcatagacactttgttcttgacttcctagaa

SEQ ID NO: 2669 - DNA, 179 bp, Homo sapiens
taaaaaagacatttgccagatgaaatttcaggccattttgtatactgaaatgaaggcttcggggcagaaggacattttggaaaagggagyctgtttccttctatcttgctcagagtttgttatcaaacagataagagttcacatctctgcagcatggttgactagctgcatgacctgag

SEQ ID NO: 2670 - DNA, 179 bp, Homo sapiens; identical to SEQ ID NO: 1555

SEQ ID NO: 2671 - DNA, 179 bp, Homo sapiens; identical to SEQ ID NO: 2222

SEQ ID NO: 2672 - DNA, 179 bp, Homo sapiens; identical to SEQ ID NO: 1495

SEQ ID NO: 2673 - DNA, 179 bp, Homo sapiens; identical to SEQ ID NO: 1568

SEQ ID NO: 2674 - DNA, 179 bp, Homo sapiens
cttgacctcctagcctcaagtgatcctcccacttcagtctctcaaagtgctgggattacaggccttaaccatcgtgcctggcccaagatyattattattattcaagattgaaaatacagcatatcctgatacataaaaccccaactttataaaactgttaaattggtaaaagattattt

SEQ ID NO: 2675 - DNA, 179 bp, Homo sapiens; identical to SEQ ID NO: 1660

SEQ ID NO: 2676 - DNA, 179 bp, Homo sapiens; identical to SEQ ID NO: 1674

SEQ ID NO: 2677 - DNA, 179 bp, Homo sapiens
tttaaaattatatattaaatattatatagatatttaaataaaatattaaaagatatattaaaatagtttatcagtgaaatgatactcaarcatgttcaagctagccttaaagagtttcaaaagagacctatcagctctcctcaccctagttagtgtcataatgatcagtcatgtgaggt

SEQ ID NO: 2678 - DNA, 179 bp, Homo sapiens; identical to SEQ ID NO: 1567

SEQ ID NO: 2679 - DNA, 179 bp, Homo sapiens; identical to SEQ ID NO: 2326

SEQ ID NO: 2680 - DNA, 179 bp, Homo sapiens; identical to SEQ ID NO: 1970

SEQ ID NO: 2681 - DNA, 179 bp, Homo sapiens
gttttttgtcaaaacagaaaaaacacactactaggatatgaaaaacttcattctgggcctggttaggtcataaactacagaaccttaggycatatattctcaccgggcgcttgtttctccactgcaaaaaataattcgtatttgcttggtcctttgtagtactttactgtttataaatg

SEQ ID NO: 2682 - DNA, 179 bp, Homo sapiens
tgttgtcattacaaccctttcaagacctagggcttggatttcaagtgccttttcaggtgccagtgaaaaatccatcagtttgcaaccagmaaatcgttcagcggagcttatgtatttatttattagtaacaacagtctggatacttctctgtagttctctccaaatgtcaagcccaggc

SEQ ID NO: 2683 - DNA, 179 bp, Homo sapiens
aggtatttcttacgaggtgcaaagatgactaccaattgctccaggcttacatcctgccatgttaagaaacccagcaaaaggcaaatatcycttccaatagggcttgcatgaatccttgcagagtctttggtccagggtgggtcacgtgcccatccctaagccagtcatgtggctcagat

SEQ ID NO: 2684 - DNA, 179 bp, Homo sapiens
agcaagactccagttctaaaaaataaataaataagaaaggaaaataagactgggcgcagtggctcataactgcaatcccagcgctttggraggctgaggtgagtagatcatctgaggtcaggagttcaagaccagcctggccaacatggtgaaaccccatctctactaaaaaatataca

SEQ ID NO: 2685 - DNA, 179 bp, Homo sapiens; identical to SEQ ID NO: 1601

SEQ ID NO: 2686 - DNA, 179 bp, Homo sapiens
aaagtcgatacctttcagtccatattggaatggagataacgatttatactccctagaaaagacacttaaactggatatggaattacttcygttatcacagtctatcactgtggcctcctgtgttattaccagataccttatacacagctagggtgtcccatacaacactgcttcttgct

SEQ ID NO: 2687 - DNA, 179 bp, Homo sapiens
tttagtgtagcctgttgctctgactactgtcagatacacagtatattgttggccaaagcattaagaggctcatgactgtgactttaaccmagagttctccagctagtcagactatcattcaagaatgagcatgaaattattttgcacacagaaattgagttttccagtcacgttctgtc

SEQ ID NO: 2688 - DNA, 179 bp, Homo sapiens
gccaggcctgtgttcctcctttcatggcagtcattttaccccaccctgggtgggtgcagagatgccatcagagagccagggcctggagtyggaaaccttaggaatctacctggtcctctagtctactgcagctaagctggcatccaaaccacaagacagggtccttcccactcttcccc

SEQ ID NO: 2689 - DNA, 179 bp, Homo sapiens
gtgggacatggacacatcgtggtggtgtggcacacacagtggaaacaggcatgtcacatccagaacagagtcagaaccaggatcccgggyaacacacaggcagcaaggtcagaccgcagagaacaggccagcaaccccacccacacattttgcgcagttcccgtgggttctggtgtgct

SEQ ID NO: 2690 - DNA, 179 bp, Homo sapiens
tctgttactgaccagggtcttgtaggcatgggtttgtgtccctggcatgctaagtgacttcttgtgtaggcactggggctgcagctctcrtgcctcaggagcttgtagccaggggtgggtcagggttggaggcagacacatatgctagcacctgtgacactgggtgttactgtaggaaa

SEQ ID NO: 2691 - DNA, 179 bp, Homo sapiens; identical to SEQ ID NO: 1526

SEQ ID NO: 2692 - DNA, 179 bp, Homo sapiens
ctgatttatatatatatattacacacacacacacacacacacacacacacacacacacacacacacacacacacacacacacacacacayacatacacctaaaatggcctaaagcagacatccatgtaattacagttgcaaaatgaaaacattttggaaagaacattgtatcatagttc

SEQ ID NO: 2693 - DNA, 179 bp, Homo sapiens
cagaggttgcagcctgggtgacagagtgagactctgtctcaaaagaaaaaaaaaaaaaggaaggaagaaggaaaagaaagaaagaaagamagccatagtcaagttcaattccagacaatggcaatgatttatttataaacattgcatattttgtcagaatttaaaatgaaactggtagg

SEQ ID NO: 2694 - DNA, 179 bp, Homo sapiens; identical to SEQ ID NO: 1868

SEQ ID NO: 2695 - DNA, 179 bp, Homo sapiens
ataagttgtactttagaaagaaggaaatgaagtcagaagaaaggaatgaataataagaagcaatgttgagcaatcacattgttgagcatrttgagaagcaattgttgagcatatgaaaaaataagagtgataatgtaggatttcagtttgcatagcactttcacatttattcagctttt

SEQ ID NO: 2696 - DNA, 179 bp, Homo sapiens
tgatttcagggattattactctcaaaccttattgaggaccccaaataacttttgtttatgttgatacctttttgtttatgccagatataygtatatcatattagaaattaatatatatgtatatatgcttatatacctatatatacataactagctacatggtctagttgtatgtatat

SEQ ID NO: 2697 - DNA, 179 bp, Homo sapiens
aagctcctacaacagacattgatgttcttagttctctgcagtaaccactggctttgtggataacagctcttccagcttctctagtacagygaacttcacatgccagtccacagtctggtgctgagctagctgtgtcaccatcacaggggagaattggactaagatgcagattcctggac

SEQ ID NO: 2698 - DNA, 179 bp, Homo sapiens
ataattttaaaaaaccagagagatagtgtggttttgttgaaatagccactggactcgaagacaggaagcatgagttctgatgctatctgsgtcttttgaattctttgaccctcatttctgtaatttgtaaactggagatgattacctcggccctacttatctgacactgtaggaaaatc

SEQ ID NO: 2699 - DNA, 179 bp, Homo sapiens
tgttgattactggcaaactccatcatttcccaccatccaccatgatctgcaaagaatccttaagagagaccctagtctgtgtttatgtgrgtgcctgggatggagaggtatctagttcaatgataaaatttttgtctgggctacatggaatcatggaatttcagttctgcccagtccct

SEQ ID NO: 2700 - DNA, 179 bp, Homo sapiens
acatgtgaacaaaggtctctggttttcctaggcagagggccctgccgccttccgcagtgtttgtgtccctgggtacttgagattagggaktggtgatgactcttaacgagcatgctgccttcaagcatctgtttaacaaagcacatcttgcaccgcccttaattcatttaaccctgagt

SEQ ID NO: 2701 - DNA, 179 bp, Homo sapiens
agtgattataatcttggatactggagccatactttccatgcttaaatccccactctacaaattaccagttgtgggactattagaagattmcttaactcctgtgtgccttagttttctcatctacaaaataatcgtaataatagaactacagtccaggcacggtggctcacgcctgtaat

SEQ ID NO: 2702 - DNA, 179 bp, Homo sapiens
tatttcgaatttcccctttaccccaaattttcgtcctattatatccttaacagatatcacaggattcctttcgaattcttggaggaagargcctggaaaacagtgtgagttcttacagtttttaaagctgtggattaatattaccagttatatttaagtaagccaaatatttttaagga

SEQ ID NO: 2703 - DNA, 179 bp, Homo sapiens
ggaacattctatcactatctttagggtttggggaagggtataggaagaccttgtgtgtgactttgggcgagtcccttaacctctctgggmcttattctggaaaaggatgtgtgtcacggggggttgttatacagattatttcatcacccaggtattaagcctagtacccattagttatt

SEQ ID NO: 2704 - DNA, 179 bp, Homo sapiens
cagtaggcccttgtgctccaaaaactgaccatgcttgcaaagctcacatgggcccatctcacaaaagaggagaaggcacaagtgctggayggagtgaggtcaagctgcaggacagtggccaccaagcactctgaacacgtgccctccaccttccgtgggctagatgtgagtgaggctgg

SEQ ID NO: 2705 - DNA, 179 bp, Homo sapiens
gaaaataggaagaaaacgagggggaaaataataaaaacaggaggcttattgaaggagggaggagcaggggagagtgggagcatggggagmagacagtttgttccagcaggctggatgttgggaggaatatgatgggggctcaaaataaataagactagctctattctcaacacttctat

SEQ ID NO: 2706 - DNA, 179 bp, Homo sapiens
gaaaactaggggcccaagagggaaaggggactcctcctcaagcagacagctcttctccatccctgtccgccctgtccgatagtagagcgrggggctcatggtggcttctgaaagtggccctagccttggctagggctagtggggcagcttggtgacatgcccaggtgaggaccccatgg

SEQ ID NO: 2707 - DNA, 179 bp, Homo sapiens
tcagtccagcaggtaatgaaagccactggcagagaagcagaccccaggggtagaactaggcctgagccagggagcccagtgagtgggcartgccaatccccacagcctggctctggactgaggagccccccagtggctcagctgccctaccagcctcatagtgtagcctccatgcctgt

SEQ ID NO: 2708 - DNA, 179 bp, Homo sapiens
cgtattttgtaaatgaagaaacaagaaatgggtggacgcgacttgcagcttagtggcaaagccaggtttgaccaggtctctgggcttccrgtccaccaaacctctagtagtgtttagaaacatttctggaagtctcccaatttttccaaaagtaggaaaaatttattatgtagattgag

SEQ ID NO: 2709 - DNA, 179 bp, Homo sapiens
ctgattaactagacttggtttatgttaagcctttgagtcctttgttacagacatcatttgtgcccaagttgctttctcctcctgaaaccycattgctgacctgtaactagtctaatcttgcttgattatacgtttcccccgcccccatccctctgtaaaaccatcttttgtaccaaatg

SEQ ID NO: 2710 - DNA, 179 bp, Homo sapiens
ctgctaccctttggcctggaacaggtaccccagtgtgagaagtaccgtcttccagggtttgtgctgccacaaaagcatctgctgaggctytatagataacacagggggcgaccacattcttgttgactttaccacactttgtgactccctcacttttcatgttccttccccccctcagg

SEQ ID NO: 2711 - DNA, 179 bp, Homo sapiens
gaaaatgccctcaggagtcttgagacatcatttgaagtgatatgggagtaatatttttttttaagtctcttgctttatatttagggaaarcttttgttcatttccatatctatttgttttaatgaaagttaaattattttactggttgtctccctaccctcaccctaaattttcaagta

SEQ ID NO: 2712 - DNA, 179 bp, Homo sapiens
aactatggctcagctgcatctgtgccctcagttctggtccccagcttcccctgaatccccttcgtgctgttatttgggctttgtattggyacctaaccacattctacctgtagtgaaagctgaaggtcttggttcccactctaggtggtaagtttcttgagtggaggcaccagctgcat

SEQ ID NO: 2713 - DNA, 179 bp, Homo sapiens
gttggtcaggctggtctcaaactcccaacctcaggagatctgcctgccttggcctcccaaagtgctgggattacaggcatgagccaccayacctggcccagatgccaattggaaggaaatttgaaaaggtttagtaataatgttatttcattaatttcagccaaaccacacaactaatt

SEQ ID NO: 2714 - DNA, 179 bp, Homo sapiens
agtattgtcagtaaaacgtcttggggcataagaacttgtctgaatctgtcatacataccactgctgtcttttccgagtggtattacaagwaagatttttgtggtgtgtttgttctaagagaaatgccaaggctttcagataaagataagatgataatgattgacattgttctgctcttt

SEQ ID NO: 2715 - DNA, 179 bp, Homo sapiens
gtgttggaaatatttagttcttagaattcacgttataggtttggattttataattgataagcctacctgactacttactttatagtcctyattttgaataattattataagagctttctgtcctggaataattatggctttcatttattgaaacaagtagtcaataattgcctagcact

SEQ ID NO: 2716 - DNA, 179 bp, Homo sapiens
tgatggtgtggcctgggtgtttctccaggagtgtgagtgggcagctctgtgggataagtcctaggtacctactgcccatctctagaggcrggcccccaactcccttcccctgttgctctgttctgccgacctgcattgccagcagccttggagttacttatgctcttcttgctcgttcc

SEQ ID NO: 2717 - DNA, 179 bp, Homo sapiens
catgatattgacaattgttgcgtaaactattggtgattatgtcattaagatagtaattctcaaccttggacactcattataatcacctgsagaagtttttgcagtcctgatgcccagacctgaacctcatacttacaaaactggaaactctcagggatgagacccaggcatcaatatca

SEQ ID NO: 2718 - DNA, 179 bp, Homo sapiens
gcagcccatccctgaacctaaccctgcacccagggtgctgtttgttccctgcccaccccttcataccttcactctgtgtgtccttccccrtcctggcacacttccaagtgccttctgtatcctcactatagttcattctgatggatttggtcagggctgggctcacatcaggtgtgaaa

SEQ ID NO: 2719 - DNA, 179 bp, Homo sapiens
gaatcttcctgctgaaacagaaaatgttagtatataaaaagtgtatatctgtattttttttacctttttttttgagatggatttttgctmtgttgcctaggctggtcttgaatttctgggttcaagtgaccctcctgcctcagcctcctgagtagctgggattacaggtatgtgccact

SEQ ID NO: 2720 - DNA, 179 bp, Homo sapiens
tgtggagtcctctaccttcctgtttctttgagggtttaaccaaaggtggcatttaagtgtaagctccttgcatgacaggcaagctgggtrgatgtaggtggggacaccacaagacaccttgcctgtggagcccctcctgccccacaggtagaatgttgaatgcactagttctctgctat

SEQ ID NO: 2721 - DNA, 179 bp, Homo sapiens
tcaggtgctcatgaatttcaggcccttcaccatcatgattttttatgccttcatgatgtggcagccacatctgagcaaagcattcaggaygcagtgatagcagtgctgaactgagtccaggggattgaccgctcttctcagggacgctccacttttcacactatataccattgcttcct

SEQ ID NO: 2722 - DNA, 179 bp, Homo sapiens
tttccacacaaaattatgacccaactacttctttttgttaagtggaaatgatagagtagttgttttcaaggatttgtacatccttggaarattccagtagatatgggagtgaaggaagtcaaaggaattagtattttaaaattaattcatttaatatctctcctcccatattaatttct

SEQ ID NO: 2723 - DNA, 179 bp, Homo sapiens
ttgctcaaaatggctcctcaggctctcatcagttgtttcaaaggtcaacactccaatgaagagcttcctcagctgttcaggctttttagragactctgacttagacaggacggcagtgagaagagagaatctaacggtgcttcttcaatggcatttacaggcagaaaggttaatttttg

SEQ ID NO: 2724 - DNA, 179 bp, Homo sapiens; identical to SEQ ID NO: 1801

SEQ ID NO: 2725 - DNA, 179 bp, Homo sapiens
gggtttgtctgttgtttgctcatgattcattatgtttttggcagaatgtaggagcagtgatcttgtgtccttctcagtgcattgcatcargaggtgcataatatcagtttgtctgattattgatgattttaactttacttggttaaggtggtgtctaccaggttttttcaccatttccc

SEQ ID NO: 2726 - DNA, 179 bp, Homo sapiens
cagttttctttgccataaagtagaacccatcaaacaaactgtgctcttgggttgcatcaaaagaggtataagtgagtagaataggggtayacagttactcattcattcagttacttatccttccgtgatttcaacactccttgaatgcttaatttgttattatttccagaaatctcaga

SEQ ID NO: 2727 - DNA, 179 bp, Homo sapiens
ttgtactctctaaatttatacaaatttcaaaaaagaatgggggtgagggcacaaagaggttataaaactttcccattgtcggtttttttyttttgtttttaagacaaactctcactctgttgtccaggctggagtgaggtggcatgaacatagctcacggtgacttcaggctcctgggc

SEQ ID NO: 2728 - DNA, 179 bp, Homo sapiens
gcatggaggcctctcagacatggaaaggggcccgtgtgtgtgcatgcgagtgtgtgtgtgcatgtgagtgagtgtgtgcatgtgagtttrtgcacatgtgtgtgtgtgtgcatgcgagtgtgtgtgtgcatgcaagtgtgtgtgtgagcatgtttgagtgtgtgtatgtgagaatgtga

SEQ ID NO: 2729 - DNA, 179 bp, Homo sapiens
aggtttcagtgagccatgatcgtgccaatgcactgcagcctgggtgacagagctagaccctgtctcaaaaaaaaaaaaaaaaaaaaaaaraaagaaagaaaaaagaaaaagaaaaaagaaatataagattgaggcttggttatccataaaggaggactgaataaatttttcagctaaga

SEQ ID NO: 2730 - DNA, 179 bp, Homo sapiens
tttttttcctatcagttatcatgtttatttttttcacatgacattttaaaaatttttttgttttgggggaataggtagtgtttggttacrtggattagttctttagtggtgacttctgagattttcatgaacccatcacccgagcagtgtacactgtacccaatatatagccttctatc

SEQ ID NO: 2731 - DNA, 179 bp, Homo sapiens
ccccatttctactaaaaatacaaaattagccgggtgtggtggcgcatgcctgtaatcccagctactcggaaggctgaggcaggagaatcrcttgaacccaggaggcagaggttgtggtgagccgagattgcgccactacactccagcctgggcaacaagagcaaaactccgtctcaaaa

SEQ ID NO: 2732 - DNA, 179 bp, Homo sapiens
gaagccaacaaggtgacatgaatgattaatgtagcccagatggggcctctgctgaactctcgagtgtatttctcatttaaagaggggaaytgctacttcgttgaattaatttctgccatggacgaagaggggccagatattgtcacacccacaatttttgtttccaagataaatcagaa

SEQ ID NO: 2733 - DNA, 179 bp, Homo sapiens
attgattaaagtctttcggcctggtgcagtggctcacgcctgtaatcccagcactttgggaggccaaggtgggtggatcacctgaggtcrggagttcgaaaccagcctgaccaacatggagaaaccccatttctactaaaaatacaaaattagccgggtgtggtggcgcatgcctgtaa

SEQ ID NO: 2734 - DNA, 179 bp, Homo sapiens
gacgcaatgcccttgggtaatcaactgccacatcttgagcctccgtttcctcatccctattggggctggctgtgagatttacacaaaacragcacagagggcagcacataatacacattcaataaacaaatgaatccgaagagacaaaagggaggtgactagaacatgcatctttttaa

SEQ ID NO: 2735 - DNA, 179 bp, Homo sapiens
acatatagttctaagaaataatatagagacatccctgtgtacccatcaccaagtttccccataacatcttgcaaaactatggtacttatygcgtccaaagatttcagatatttttaaaaataaagttgaaactaagttttgaataggttatatatgcacatgaaacaaaagctaaaatt

SEQ ID NO: 2736 - DNA, 179 bp, Homo sapiens
gtatttttagtagagatggggtttcgccatgttggccaggctggtcttgaactcctggactcaagtgatccactcacctcggcctcccarcgtgctaggattacagctgtgagccactgcacccggcctctatatgttttttcaaagagagtaaaacctggtccttatttctgtctgcc

SEQ ID NO: 2737 - DNA, 179 bp, Homo sapiens
gaaagaaggaggaacaaggacatagaagatttaaaaagaaagaaagaaaaaagaaacaaaaaaggaaagaaagaaaagaaaagaaaaaawcagcatgggatctaagattacgcagctcccaattcaggccccatccctatcccttacaggctgtgtgtccatctgacacacaaccctcc

SEQ ID NO: 2738 - DNA, 179 bp, Homo sapiens
ttaggtctctcttctctctacctccatcatgattcataattactccaagttttagaattttcctgttcctgctgtctcctcacccctgcyacccacgcaccacaaaacctacctattctgggtccagtgggctcagtggcatttactagatcagaacaaactgtgaactaattgcagct

SEQ ID NO: 2739 - DNA, 179 bp, Homo sapiens
tgagcacttactccctgtcagccacttgaggggtttatatacattattctttaaagccctatgaggtaagacagccagaaagtgagaaayagtgttttaccttataggtaagaaaagtaagttttcctaaacactcagaatttggaactgatggagcaagggaagcccttcagcctaga

SEQ ID NO: 2740 - DNA, 179 bp, Homo sapiens
caggcagaggaacgtggaaggattagaatggctgagtcttctggcctccatctttctcctgtgctggacacttcctgaccttgaacttcrgactccaagttcttcggcttttggactcttggacttacaccagtggtttgccaggggctttcaggccctcagccacagactgaaggctg

SEQ ID NO: 2741 - DNA, 179 bp, Homo sapiens
atttgctggtggccaagtatgccctgagattttgtggggaggacaaaagtagcactgtaaacaacctcatatacatgagtgtggacatgygcacataacaacacacactcacacacactcatgtgtgcacagactcaaaacatttacaattacacacttacatgagcacaaacatccta

SEQ ID NO: 2742 - DNA, 179 bp, Homo sapiens
atacacacgctgtgatggttaatattgagtgtcaacttgattgaaggatgcaatgtattgttcctgggtgtgtctgtgagagtgttgccraagaagattaacagttgagtcggtggattgggagaggcagacctgccctcaatctgaatgggtaccatctaataagcctccagcagagc

SEQ ID NO: 2743 - DNA, 179 bp, Homo sapiens
gtagtgatggtgatgatgctgatggtgatgatggtggtgatggtaatgatgattatataatgatgattgtggtgatggtgatgatgatgkttattatagtcatgatggtggtaatggtagtggtggtgatgatgatgatgatggtagtgatgataatgataatggtgatgagagtgagg

SEQ ID NO: 2744 - DNA, 179 bp, Homo sapiens
aaaaccttggaaacatttgggccacgcaacatactttataggttagggtaagatttggtccacccatatattcatataatatgtacttaytgagtgttagtgtgtaccaggcttgcagttgctggtgcagaatcatgaattagacacatgcacacacacacacacacacacacacacac

SEQ ID NO: 2745 - DNA, 179 bp, Homo sapiens
tcagaaaaaaaaaaattaaaattaagagatgagatattcagtgctttgttagaaaataggttttgtgttagacgattttttttcaactgyaggctagtgtaagtgttttgaggatgtttaaggtatgctaggctaagctctgatgtttggtaggttagaggtattaaatgcattttcaa

SEQ ID NO: 2746 - DNA, 179 bp, Homo sapiens
ttaaaaatataaaaccaaaagagatttcccccttcctcttggagctctgacagcaaaatattggaactaaatagatctaaatagaattgycggcaagttttgacaacttttataatgttttattgttattataatttttcttctttttctttttttcttttttttttccattacgtagc

SEQ ID NO: 2747 - DNA, 179 bp, Homo sapiens
cccaaaatacaaaaattagccgggcatggtggcacatgcctgtagtcccagctatttgggagtctgaggtgggaggacctcttgagcccsggaggtcaagactctccagcctggatgacacagtaagaccctgtctcaaaaaaaaaaaaaaaaaaaaagaaagaaagaaagaaaagaaa

SEQ ID NO: 2748 - DNA, 179 bp, Homo sapiens
gtcaacagaagtctccaccccttgtggaactcaatctagttagaaacagtcacatttacaagattgttaggggactatgatacgtgataytctgatttgttaaaaggtggagaattgagctatgtagctcagatagcctgagcttagtactagctcagtcttcacttctggctgcaaga

SEQ ID NO: 2749 - DNA, 179 bp, Homo sapiens
aaagccactcacctaattggtggtagaaccaagatttggacccaggaatggatggcttttacaatgtgtgctttcaatgttgtgtttgtyagaacctaggacatcaaaggagggtcttcaggggtcatatagatattgctttggatttcatttttaaataacttttcctgtttcaaaaa

SEQ ID NO: 2750 - DNA, 179 bp, Homo sapiens
ccaaagcatttccttcaccttccatctcctttgcaaccctcctaatcctagctggagagacagcatagtacagagctcaaggttcaggayctggggctaggtgtttcttggccctgctgcttcctaggtgactttgagattcaacttttcctttcttgcaaggggtagaaataagagca

SEQ ID NO: 2751 - DNA, 179 bp, Homo sapiens
tggttggaatggatcaaatattccatccgcacattaaacaaaagcaattgttatgcttgtgcacatcacaggccagaggcccagattgtyccctttccactagggtggtcctccagtcgactgggggtgggctgcctggtagctcttttccaggattctacagcctagggtaaaaagtg

SEQ ID NO: 2752 - DNA, 179 bp, Homo sapiens
tggccgactatcacctcatgtcctgatggttatttatgatgactcggcagagattatgttccttgataaacacagaggaccaggtgtcarcttatattggaacagtctgctgtagccctgttttggggcagaggtaaaaaattcaaaccctacagaaatacctaaagagaaaggcagac

SEQ ID NO: 2753 - DNA, 179 bp, Homo sapiens
tcttaacattctaattctaatacacttgaggaagttgttctgatctaacatgcacggacacggcagggactgcagagggcacacccaagrctggatttcgcctagtgcaaatagtaaataatcactggcttcttcaagtctgcaaagtgcttactcagtttacactacaccagcaggag

SEQ ID NO: 2754 - DNA, 179 bp, Homo sapiens
cgatactgttggcttccttacttttgacgttttgggactcacactggcttccttgctcctcagcttgcagacagcctattgtgggacttyacctggtgatcacatgagtcaatgctccttaataaactccctttcatgtatacatctatcctattagtcctgtccctctagagaaccct

SEQ ID NO: 2755 - DNA, 179 bp, Homo sapiens
gcctgggaggagaaaggaatggagagtggccattaataaatatggaatttttgaaagagaggatctaaattagacagtggtgacagctgygccactcttaaatacattagaaaagattgaattatatacattatttattttcacttatttattttttcagacagggtctcactttgtcg

SEQ ID NO: 2756 - DNA, 179 bp, Homo sapiens
ccctgtcctgataaatgggctctgtctcggctgtgggcaaggtgaacccattgggcggttacaccagtatctgtgctttttgtagtgtgrcgttacagatccccgtcatggagaactggagtctatttccttgtccttgaatctaggccagcctcgtgatttgctttggtgaatagaaa

SEQ ID NO: 2757 - DNA, 179 bp, Homo sapiens
aaataatgttgtgttacagctgcctatggtattcagtaatatgctacacaggtttgtagcctaggagcaggccatatcatatagcctggrtatgagtaagctataccatctagcttcacataagtcactagtcttgtctttttttttgtacttatttatttattcataatttcaacttt

SEQ ID NO: 2758 - DNA, 179 bp, Homo sapiens
gaaggatacgtagcagcatccctgaccttcattgatgggatgccagcagcacccccgccagctgtgacagcctaagatgtctccagacaytgtcaaatgtcccctgggggagggaaggaggaacaggatcaccttccccactgagaatcactgttttagcacaatggagcatattaaat

SEQ ID NO: 2759 - DNA, 179 bp, Homo sapiens
agccaagattgcaccatttcactctaacctgggcgacagagtgagattctgtcaagaagaaagaaagaaagagaaagaaagaaagaaagraaggaaagaaagaaagaaagaaggaaggaaggaaggaaggaaggaaggaaggaaggaaggaaggaaggaaagaaagagggagggaggga

SEQ ID NO: 2760 - DNA, 179 bp, Homo sapiens
gatggggtttctccatgttggccaggctggtctcgaactcctgacctctagtgatccacctgcctcagccttccaaagagctcggtttayaggtgtgagccaccgttcccaacccagatgcatgcattttaaaagaaggtatgaggatacaaaatatacaaagaagggggcattttcag

SEQ ID NO: 2761 - DNA, 179 bp, Homo sapiens
taggatttataatttttttttttttttttggagatggaattttgctcttcttgcccagcctggagtgcaatggtgcgatctcggctcacygaaacccacgcctcccgtgttcaagcaattctcctgcctcagcctcctgagtagctgggattataggcatgtgccaccacgcccagtta

SEQ ID NO: 2762 - DNA, 179 bp, Homo sapiens
gaagggagggagcggtgaaggaagaaagcgaaatcgggtcttgactgtgaacctgtggatgtcagcttcccacagagaagacagcggaarctcacaggtggaaagtgagccgggggactctggagtactgtgtatatggacaggctaagcgtgagccacccaagccttccttctcacct

SEQ ID NO: 2763 - DNA, 179 bp, Homo sapiens
cagtggttttaggggtgtagatctcaaagtctatggataggaaaaaagaggtctgggcctgctaggagccagaaggctgtcagtgacagrggctactttccatctctctgttcccacatgatctcttttctacatctctgtagctctgcttaattctgtttgaatgacagaagacgcta

SEQ ID NO: 2764 - DNA, 179 bp, Homo sapiens
gaaaccctgtctcaatcaatcaatcaatcaatcaatcaatcaatgcttaactattaaaattaaagagtatacctgaaataatatcatgcrcaaagagctacacgtaacgcattttgaaggatcttgaattcgtccatttcatcctttctatgactctatgtgataggtattatctttga

SEQ ID NO: 2765 - DNA, 179 bp, Homo sapiens
aggctaggagtttgagaccagcctgggcaacatggcgaaaccccgtctctactaaaaacacacaaaaaaattagccaggcatggtggcgygtacctgtaatcccagctacttgggaagctgaagcatgagaatcgcttgaacctgggaggcggaggttgcagtgagccaagattgggcc

SEQ ID NO: 2766 - DNA, 179 bp, Homo sapiens
tgaagggcagggcaagccctctttttcctccccactcccagtgactgggtgatggcagcacagcggggtgctgtctgggccatggaggcrtgtcagagtgacagttcagaggggctgggcccctgctgctgtcagaccaggcctgttcaccttccaactgtcatgtgacagaaatccac

SEQ ID NO: 2767 - DNA, 179 bp, Homo sapiens
tctatatctgtgtatgtctatctctgtctctttgtctctgtctctctgtctctgtctgtctgtgtgtatgtgtctgtgtattttggatayggggcccagcttccatcaggttatccaagagctccgtgactccaaagggattctgaacttccgggccaggaggttaaggatattggaga

SEQ ID NO: 2768 - DNA, 179 bp, Homo sapiens
tcataactttctcatattactggctctggatactgctgcacaggccgcctcattgtgtaaaagtcccccaagaatcctggtgcaccctcygaccatcctaactccccacaagatgaccgccttcccaagcataacagccaggaattccccgacgtgagtgaccccaagcacataaaagg

SEQ ID NO: 2769 - DNA, 179 bp, Homo sapiens
tgctaatttttgtattttttgtagagatggggttttgccatattggccaggctgctctcaaactcctgacttcaagtgatctgtccaccycagcctcccaaagtgctgggattacaggtgtgagccaccgtgcctgacctgtcatacaatttccttgtgacattaagtaaataaaaaga

SEQ ID NO: 2770 - DNA, 179 bp, Homo sapiens
cctttttatagaggaggaaacttaaggcttgggctaacttaggtttcacggtaagccctgccacacaccagctgtgtaatctgggggggkaattttcaacctctctgagctcaagaatactaatgagctgaccctcttgaaagttcttgtgtttcttctgtcctataagcttgggtcct

SEQ ID NO: 2771 - DNA, 179 bp, Homo sapiens
ttgtttgtgtttgtttttgagacagtctcgctctgtcgcccaggctggagtgcaatggtgcaatctcagctcactgcaacctctgcctcycaggttcaagcgattctcctgcctcagcctcccaagtagctgggactgcaagcacccaccatcatgcccagctaatttttgtattttta

SEQ ID NO: 2772 - DNA, 179 bp, Homo sapiens
gatgaactttcatgtctgggaagaccaacaaaggctaccaagggggcaaagtctggagaagtcaattaggtgggcttgcaataagaggtkattctgagaggccaggagttaacatagaaagtcttgtcaccaaagggaactagaagaaggatcttttagaccgggggggacatttggtt

SEQ ID NO: 2773 - DNA, 179 bp, Homo sapiens
cacttcaagtcatgtcattagatggggggttagcagaggcaaatcaagacagtcatgattgctttgcaaatgtttgaactgattcagacraatgttaaaatctgccacatctattccagtaaaaatggtagaaaaaaccctgccacagcatccaataagtgtgggaaaagatgctcaac

SEQ ID NO: 2774 - DNA, 179 bp, Homo sapiens
taaataaataaataaatcaggagaaagagtgaggggaagcagtggaggctgatttttgtgctatattttgaagtcttagaactggaagcrgtcataacttttctggtgcgagaggtgggcagaataaatgctgctcgtcactgcagggctttgcagctcagatggtatccattggcacc

SEQ ID NO: 2775 - DNA, 179 bp, Homo sapiens
agggccatacccacagcgccctgatggaggaaccagaccgcaggctgtgccaccattaaacaagagcggctgtggccccatgctgtgctkcttggggtggcagggaaggtggggtcagcgctttttctcctctcaggtttgggttctgcgccatcccccatgcagcctcctgtgcagcc

SEQ ID NO: 2776 - DNA, 179 bp, Homo sapiens
ttcctgggagcgccacaggcaggagaatcctattacaagccgccccattaattataaagagtcaagtcgatgctttcctgcaattttttrtcttaagtccaaaaactgattaccttcaccaatgcttccccctccaaaaagatctaaaaaataaaataaatgtttgaagaacaaatacc

SEQ ID NO: 2777 - DNA, 179 bp, Homo sapiens
ccccacttcccatacatttgcatttcagctccaagagggcaggaatgatgttcatgtatcttgccaaaagcataatagtgattaaaagtkgaggctttagggccaagctgcatggatttaaatctcagccatgccacactctagcagagtgaccttgagcaagtgtcttaacctctctg

SEQ ID NO: 2778 - DNA, 179 bp, Homo sapiens
ttctgggttcagcttcttcatctgtaagatggaaagggtaggaaatagcacttcctacaaagggcagtgttgagaattaaatgggaaaayacatgaagcacttagtccagagcccagaaacactcaataaatagcaactaaccaggtgcagttgtgcacgcctatagttccagctgctc

SEQ ID NO: 2779 - DNA, 179 bp, Homo sapiens
tagcttcttttctttctcaggatttcttggttcaaacttgagacccccaggatccacagactgtagagagctttgaaaaacctaggagarggtcaaacaggctctaggggcatttatcaacagccaaaggcttggtaaatattgccaatgttcgatatttccaccagcacatatactgc

SEQ ID NO: 2780 - DNA, 179 bp, Homo sapiens
tttgcagtgagctgagactgtgccactgcactccagcctgggtgacagagcaagactctgtctcaaaaacaaaaacagaaaagacaaaastgcatcacagccctgctccttcctctgtttactcttgcttcctttccttccctttcacagttgttggtcctaagagcactcctgtcttc

SEQ ID NO: 2781 - DNA, 179 bp, Homo sapiens
aagatttagctccaacttataagtgagaagatatttggttttctgttcctgtgttgattcacataggttgatagcctccagctccatccrtgttcccgcaaaggacatgatttcattcttttttatggctgtgtagtattccgtggtgtatatgtaccatattttctttatccagtctg

SEQ ID NO: 2782 - DNA, 179 bp, Homo sapiens
tggagttaacaagagagcaaaagaaggcggacaaaggaagggactctttctatctctgttgcatcacctgtgcttaaaagtggggctttrgggatcagacagacttgggttgcctctgccagttacttctgtgtggctttgaacaagtgacttcccctttctgataataacatagctaa

SEQ ID NO: 2783 - DNA, 179 bp, Homo sapiens
agtagctgggattacaggtgcctgccaccatgccctgctaatttttgtatttttagtagagacagggttttgccatgttggccaggctcrtcttgaactcttgacctcaggtgatccgcctgcctcagcctcccaaagtgcaggtattacaggcatgagccaccgtgcccagccaatta

SEQ ID NO: 2784 - DNA, 179 bp, Homo sapiens
tgctgggattacaggcataagccatggagcctgacccttttcttttcttttctttccttttttcttttcttttctcttctcttttctttycttccttccttccttcgttccttccttccttccttccctccctccctccttctttctttctctctctctctttctttctttgtgtttgt

SEQ ID NO: 2785 - DNA, 179 bp, Homo sapiens
ccccaaacaaaacaaaacaaaagacttttctaaaacatcttgttgtacgtcatacatatatgcatatttatttatttatttatttatttwtttatttttgagacagggtctcactctgtcacccaggctagagtgcagtggcacaatctcagctcactggaacatacacctcccagatg

SEQ ID NO: 2786 - DNA, 179 bp, Homo sapiens
catgatcttttattagttttacaaaagtgatttcagtccctgagcaaggagggggttagctttgttttttttgttctttttttttttttkgggacagagtcttactctgttgcccaggctggagtgcagtggcatgatcatggctcactgtagccttcaccttgtgggctcaagtgagc

SEQ ID NO: 2787 - DNA, 179 bp, Homo sapiens
aggaaggaaggaaagaatggagggagggagaaagggagggaaggtaggagggagggaaggaaggaaggaaggaaggaaggaaggagggarggaaggaaggagcaaaatactccaaggaacaaaatattccttattatctctgcatttcccatgttttctacattgaatccttatcgctt

SEQ ID NO: 2788 - DNA, 179 bp, Homo sapiens
gtgtccgctgtgggccagaacctgaagtaggttctgaggatacaatgaattgtagactgggcacaacccctgttttcacagagcttaccrtctctgggaagttgaacagttaaacaagcaatggcagtatgtcatgagtaggacggcagagattcttcgagctcatctgatacatggag

SEQ ID NO: 2789 - DNA, 179 bp, Homo sapiens
cagcacgattcaaaagagccaacatatggaatcagcctgagtatccatgagtggatgaatggataaagaaaatgtggtgtgtatatatayacacacacacacacacactagaatactattcagccttaaaaataaagaaggaaatcctctcgtttgagacaacatgaatgaacctggag

SEQ ID NO: 2790 - DNA, 179 bp, Homo sapiens
accactcaggtgtttccatgcactctcttttacctctgtgactgccacaagaacaggcttgggctgacctgctgaggtctacagcaggtmtttgtcttctctctatggaagagagctagttattatagccaagaccatcaaagattggcaaacagtcatttgactgcatgacatgtggg

SEQ ID NO: 2791 - DNA, 179 bp, Homo sapiens
acacagcatgcccagccaagaccagcagaaatatgcaactgactccaggactcttgagtgataataaatggctaccttttaggattgttygttatgcagctacagctaactgatacaataatcaccacttttgttattgctaagtatttcctgtgcctgcaaattccactaaattcttt

SEQ ID NO: 2792 - DNA, 179 bp, Homo sapiens
acttttgttattgctaagtatttcctgtgcctgcaaattccactaaattctttataaacatctaatcatttggttctcatctaaattaakatactgttaccattataaagatgaggaaactgaggttcagagagcttgtcactgctccaaaccaatgtgactagaaaatggctcagtac

SEQ ID NO: 2793 - DNA, 179 bp, Homo sapiens
tcaggctgagttacgagctcagcgatttgtgggacgtttacatgaaccagaagatgtgttatctgatgaaaattgcttaatttaatatcytggcttgacaggcaaagaactgtacctctctgggagaatctgccagggtggatgctttttaaaaagtccctggacatgtttaaggaaag

SEQ ID NO: 2794 - DNA, 179 bp, Homo sapiens
acagtgatggattttatttatttgtttatttttggcttcctgcgggtctcccaagatgctaaatgaaacaagaaaagtcaaattcagggygggcgcggtggctcacgcctgtaatcccagcactttgggaggctgaggcgggcacataacctgaggtcaggagtttgagaccagcctga

SEQ ID NO: 2795 - DNA, 179 bp, Homo sapiens
tatattttgtgcaaaatctatctatctatctatctatctatctatctatctatctatctatatatctatctatctatctatctatatatmtatcatctatcacctattatctacctattcatatatatatattctacctatctgtcatctagctatgtatcatctatctaactactctt

SEQ ID NO: 2796 - DNA, 179 bp, Homo sapiens
ttatctgaccggcagtgcagtaggtttatttacatcagcaccaccccaagtgtgagtaatgtgctattgaatatttagatcatttatgtycattgccaacacgattgcaaaaagcatccttttagccaaagttgtatgcacatttctttgcataaatgaagagaagttaccaggccaaa

SEQ ID NO: 2797 - DNA, 179 bp, Homo sapiens
tattgtggaatgaataaatgggcaatttgagcaccagctctagaaacacaccatcccactcagactttctctcctgctagcaatcaaaayctcaaatgcagtcatgggacttagggaagaagagcatgggatagcccactgaaaaccaccttctactgatgctgaggggagagtccact

SEQ ID NO: 2798 - DNA, 179 bp, Homo sapiens
catcggaggacaggaagagagagaagccaggtgttttgtctccctggtccctgtccatcttattgcagtttggcagtgactgtatttctycatagccacagctcctgctgggtggttgttcctccataattccaactctggtcagtctgctaatgctgtcccctccccttttcccgtca

SEQ ID NO: 2799 - DNA, 179 bp, Homo sapiens
gtacatttcaccctatataaattcaacctaaaatacaggagtgtgaacaaaaattgagtcctagttaatgatgtgcacactgtagtgttyggggtaaaatgtactcatgtctgcaatttaatttgaaatgcatcaataaaaagaaggagggagggagagagggacggaaggatggctag

SEQ ID NO: 2800 - DNA, 179 bp, Homo sapiens
aaagatttgtttccctaggagaaataaatatgggattaagtgaaaatgctggtttacatttaattattaacgctgcaaagtgcattaagytatacttaatcacctgcatccttgcgtgaattactttcttcattcctatttacactgacaagtagctgagactcaacttttaaattttg

SEQ ID NO: 2801 - DNA, 179 bp, Homo sapiens
acctcacctcaggctggtcattacttactggggagagtcagaagctgaaagttcctcctaccccacaccataaataaactgtctccttcwtcaacccacaaatcattccagatttttggagtaaatagtaatagctgtgttttcccccatgggcatagctgagggtgtattgtatgtgc

SEQ ID NO: 2802 - DNA, 179 bp, Homo sapiens
tggcgaagatatggacaagaaacaaaatgttcttaatattgtaaagaaacaattcaattacaaaacaatgtatttatttatttatttatwtttatttattttatttattttttgaggcagagtctcattctgtcacccaggctggagtgcagtggcatgatcttggctcactgcaacct

SEQ ID NO: 2803 - DNA, 179 bp, Homo sapiens
ttgaagcccctctgatggcaaggagccctggcgcttggagcgagaaagtgggtgcaggtctctccaaagagagctgagctcattctgcakctccctttccagcagtggttcagggctggcgctgcagagggaggaaggcaaagtgggcacgaaagggctctgaggtcactgccggcagc

SEQ ID NO: 2804 - DNA, 179 bp, Homo sapiens
aatgggaccagcttaatatgaaaatctcttggacccacacttaggagtcatccttgatttcccctttctctcctgcctcacacacaatcyatcagcaagttcagttagctctgcctccaaaatacattccaacccatctaattctcatcttttcctccattatcaccccggtcgaagcc

SEQ ID NO: 2805 - DNA, 179 bp, Homo sapiens
tttttttttttgacagagtcttgctctgttgcccaggctggggtggtgcagtagcacaatctcgactcattgcaacgtctgccttccagrttcaagcaattctcctgccgtagcctcctgaatagctaggattacaggcacctgccaccacgcccagctaatttgtgtatttttagtag

SEQ ID NO: 2806 - DNA, 179 bp, Homo sapiens
aaatagaaatggagctgtcatagtccaagttttagagcctaagccctcaatttgcagaggaaaaggggtagagggtgggaaagagagagraatgaaatcattcatttaaaaaatttctttattcagcaaacattaaaaaataccacatgtaaaacactaaaccattgaataatacattt

SEQ ID NO: 2807 - DNA, 179 bp, Homo sapiens
cgaactctagccctttgcctattgtagcaggggtctcccttctccccatgaggcaaatctactaagagaacttccagagccctttcttgrggaggggaggaaggttaaaagtgtatatagagcattctttctggctctgctcaggcagggcaaaaggagtggggtttctggtttcaaag

SEQ ID NO: 2808 - DNA, 179 bp, Homo sapiens
actaatctgcctcagtttcccagttccttacttcccaaattctctgttatacaaactcttattgctctctcctctcctttcctttccttycctccctccctcctttccttccttcctgccttcctgccttcctgactgccttcctgcctccctccctccctccctcccttccttctttc

SEQ ID NO: 2809 - DNA, 179 bp, Homo sapiens
ttctgtgtacccacacctggccccatgttgagtgaatgaatgagagaatagctcacttagatccagcctgcttcacttcaccccacctcrtgaatgcaccttaagcgtttattcaggctgggatgggaacaggacactaaaccgcggctccaattatttgcattgtgatttacaactta

SEQ ID NO: 2810 - DNA, 179 bp, Homo sapiens
gctgccctgctctgttttagatcaagatgacttaggtgagctcataaaactggaggggcaaaattttagattctctgtttaaagaaaggyagggacctacttgtccatggacagattgactagatcgtgctttaacagaagttcccaaacatttttttcatttttgagacagggtcttg

SEQ ID NO: 2811 - DNA, 179 bp, Homo sapiens
taaacacacatggtattttgaaatatgtcaatttagtctatgtatgtctttaaattccctaatttgaaagctagttaatctgagtatttmtttagacttaacctgtgggtgtccatctttaaggtggggctcaggtcattgcccaaagttagtaaaaactggtagctgacaacctagga

SEQ ID NO: 2812 - DNA, 179 bp, Homo sapiens
cagaacctcaaataaacaaaggctgctggacgagctccctcagtcatctgtgaccatgtcagaaaccagggctctactctgagctgcaawcttgaccaagaagtagaggcaggagtagacactgctccaagaagaacttgctgaggcccacgctgttcccaaacacctgccagatttcc

SEQ ID NO: 2813 - DNA, 179 bp, Homo sapiens
cctcaaataaacaaaggctgctggacgagctccctcagtcatctgtgaccatgtcagaaaccagggctctactctgagctgcaatcttgrccaagaagtagaggcaggagtagacactgctccaagaagaacttgctgaggcccacgctgttcccaaacacctgccagatttccaggga

SEQ ID NO: 2814 - DNA, 179 bp, Homo sapiens
gctgacctcaggtaatctggccaccttggccccccaaagtgctgggattacaggtatgagccaccatgcctggctgactgtactttcacyagatggcacagactactacacacccaggctgtatggtgtagcatattgctcctaggctacaaacccatacagcatgttattgtactgaa

SEQ ID NO: 2815 - DNA, 179 bp, Homo sapiens
tcttcataacagccttgaggctcagctatggtatttccattagatagatgagaaaactgaagtttagaatatgtcatttacatgaggccrcccagcaaggccaatgaagcaaggcattaagaattagtactggcatagcttgtcctgtgtttcccaaaaggtgacacgcatgatattgg

SEQ ID NO: 2816 - DNA, 179 bp, Homo sapiens
gagatggagaagatccagaatgagattgttctgctgttaatggagtaactgcagctgaagaacgaggctgctgggtggtttgtgtttcayttcctcaaactctggctgggtcactggcgtgttacattaagtttcagagctagctgtgtagagtagaaagagtactggatggagagaga

SEQ ID NO: 2817 - DNA, 179 bp, Homo sapiens
gagacggagtttcactcttgttgcccaggctggagtgcagtggcacgatctgggctcactgcaacctctacctctggggttcaagcaatsctcccacctcagactcccaagtagctgggattacaggtgagcaccaccacacccagctaattttttgtatttttagtagagacggggtt

SEQ ID NO: 2818 - DNA, 179 bp, Homo sapiens
ccattgatgatgcaccattggtctccatgagcactaaaatatttactagggaacaacaggactggaggggtcctggtcatgggaagtgarcatgtgcccagtgggtgagagattcgggaaatgatttttgcctgagggtcaggaggaaggtaaatgtggcctggaaacattctggagcc

SEQ ID NO: 2819 - DNA, 179 bp, Homo sapiens
gtgtatacacagttatatgcatgtgtgtattttatatatatatatatttttttttctttttccttttttttctgcagggaaaatcccaaytctggccttaaataataaagactttttgttgtaatcccagcactttgggaggctgaggcaggtagatcagttgaggtcaggagtttgag

SEQ ID NO: 2820 - DNA, 179 bp, Homo sapiens
gctgggaggaaagggagatgggagttttcggggttttttttttgttgtttgtttgtttgttttgagacggagtcttgctctgtcacccabggtgaagtgcagtggggcaatctcagctcattacaactctgcctctgggtgcaagagattctcctgcctcagcctcccgagtagctggg

SEQ ID NO: 2821 - DNA, 179 bp, Homo sapiens
caaacacacacccctttaagcagagagaaagggaatccgatgtggctgagcatagggttggccccgacagtcatctcttacagatagatrtattgactaagctcagaaagcctacatggtaagtccaaggtcccaggaagttaagtggcagaaccaggatttatatccagattcagatc

SEQ ID NO: 2822 - DNA, 179 bp, Homo sapiens
gtgaagaagaaagggtatggcctgagacagaactgtgtttcccttctgtcctcaacttattatgactttatgcaagtcattcaatctccytgggcctcagtttctgcaaaatcacggtggtacacggagcatgcaaatcatgcaaaatcatggtggtacagattatttaattgctcggg

SEQ ID NO: 2823 - DNA, 179 bp, Homo sapiens
gcaggtagatcagttgaggtcaggagtttgagaccggcctggccaacatagtgaaactccgtctctactaaaaatacaaaaattaggccrggagcagtggctcacacctgtaatcccagcactttgggaggccgaggcaggtggatcacttgaggcgaggagttcaagaccagcctggc

SEQ ID NO: 2824 - DNA, 179 bp, Homo sapiens
cctggaggagcaaatagaagaaacccaaaagggacttgaaagcgggtcccctccctcacctggattcccagtccgaagaggaggaagcayccgccctccttccctccttctgacccacccagccacccacccaaggtgccattaaagttaattgtttttactgccagtttaacatagtc

SEQ ID NO: 2825 - DNA, 179 bp, Homo sapiens
aacaatttttccattgcatgtatttctaaacctaatattaaaaccacagatttaaggtctttctccctttatgttcttaggtctcttatstttctttgaatgaatatatctgtctatctgcctgactctcccttttcacatcttccagaaaggataaggaaaacatccaaaaggatctc

SEQ ID NO: 2826 - DNA, 179 bp, Homo sapiens
tgtcgtatgcccttactaccagcaccccatctctaagccttccttctctcccagcccccacatggtctggcctctatctcctgcccgccwgtgactgacgggccaggccaggcacccccagagaccacccccctccccagctgggggcctgtcccctctgaaactgatcctgtaccttt

SEQ ID NO: 2827 - DNA, 179 bp, Homo sapiens
aggcttaagtgcatctagccacgggctcctagttggttggaccagagaggggcagagccagaggcctcatggatggggcctgactgggtyctagggagaggtgcaggttaaggcaggatcaacctcttctgcagcatacagaactggcctctgggagaggaggatggggagatgatgac

SEQ ID NO: 2828 - DNA, 179 bp, Homo sapiens
ggtggacgcttccccgtgcgcctaggggtgcgctgggctttcccagccgaggtctgcagagcgcaccgcgtgagcttcatcgatctcatycttcttccaagtgggaggaggtggagatgctgggagagttgtggggagttgggagtgggttggagggggactgtctagattctactctg

SEQ ID NO: 2829 - DNA, 179 bp, Homo sapiens
gcccaacttgcatttcctctaacccgggaggttgagcgcccctagccccctcctccgaagcgcttctcctgctggaaaccagagggagtrggaagagtggcccagagttcgaacctaagcagagccggtggtggcggggacgacgttcccagcgggaagtcgcgggcagggacaaagct

SEQ ID NO: 2830 - DNA, 179 bp, Homo sapiens
ctaaaaatacaaaaattaggccaggagcagtggctcacacctgtaatcccagcactttgggaggccgaggcaggtggatcacttgaggcraggagttcaagaccagcctggccagcatagcaaaactccgtctctactaaaaatacaaaaattagccgggtgtggtggcgcgtgcctat

SEQ ID NO: 2831 - DNA, 179 bp, Homo sapiens
catgtccctaccgctggacatggactctgtgtgcccaatgagtgtctgcttgaggccctgcctagccacagacagccttggagagcccaygctcagatggccactccagacctggcaagatgaaaattttaaattggagatagggtgttctggggtggaagtagggttattgaaaaccg

SEQ ID NO: 2832 - DNA, 179 bp, Homo sapiens
ggccaggctggtctcgtactcctgacctccagtgatccacccacctcagcctcccaaaatgctgggattacaggcatgaaccaccccacmcacccaggagttttcttctctctgtcacattgcctctgcatgtccctttcctttcccctctgcctagctccgatcatctgtgtaagtct

SEQ ID NO: 2833 - DNA, 179 bp, Homo sapiens
gcattaggtactttccacgtgacagataggaaaactgaggcacagagaagctgagtaacctgcccaaggtcacacagctagaaagagctrgttgcaggacttaaactcaggcagaggcacccctaaccaccaatatgcatccctctgcccttcccagctctctcctgagtcacatgaaa

SEQ ID NO: 2834 - DNA, 179 bp, Homo sapiens
gttgtaatcccagcactttgggaggctgaggcaggtagatcagttgaggtcaggagtttgagaccggcctggccaacatagtgaaactcygtctctactaaaaatacaaaaattaggccaggagcagtggctcacacctgtaatcccagcactttgggaggccgaggcaggtggatcac

SEQ ID NO: 2835 - DNA, 179 bp, Homo sapiens
gccgagcaggaaagccagactctgactttgatctctgcaaagggacccgaagcgcgaggtctccttacctgctgggtgaaggcggcctgsggggacgacggggacttgctgggggccccgagcgcgctctcgggtttcgaatcgcagggcaggtcttttgcgtcaggctccagaggcgt

SEQ ID NO: 2836 - DNA, 179 bp, Homo sapiens
aacagagagagactctgtctcaaaaaaaaaaaaaggccagcaaggtggctcacgcctgtaatcccaacactttgggaggcctaggtgggygggtcaagaggtcaggagtttgagaccagcctggccaacatggtgaagccttgcttctactaaatatacaaaaaaaaaaaaaaaattag

SEQ ID NO: 2837 - DNA, 179 bp, Homo sapiens
ggggtgctttgagctgcagtggggaggaattgtggggcagagggaatggtgatggggtgtctccttaatggccccaggggtcatgtggckggtggccaagctctgactcttgcctcccacctctccatgcctgagtgctgtcctggttagggcgggcaggcattttgttcacattaggg

SEQ ID NO: 2838 - DNA, 179 bp, Homo sapiens
ggcttaggggtttaagagactcagggctttggatgtgtgtgtctctgtaggccagcacaggcctctctcgcattttgccttgtgcacccscgcaacccccagcaaccccgaaaccccaacgtggcaccaagggaagggtgaaaatgaagtgctcttgtgggccaaccacgctgagatag

SEQ ID NO: 2839 - DNA, 179 bp, Homo sapiens
agtcagccactgccaaacctgatcccagggaacccactcacctgaagaggtgacctgtggccacttattaaatgacacaccttttaaatrgcacaccctactgcaaaccttgtggctgaaaatttaaacagtgagactggccaagaggaaaagtagtgatagcagccagcatggtacaa

SEQ ID NO: 2840 - DNA, 179 bp, Homo sapiens
attgacatttttggtacccctgcaaattttgtgccctgggcaagtgccttcctccctgcaccctcatcctaaccctgtgaaacataaccytgggcctctcacatcatggaacatttcaggggactgtgcttatatggagcacacgttttgaaatctgtattatcattgcatgtgcttaa

SEQ ID NO: 2841 - DNA, 179 bp, Homo sapiens
agaggccaggtactgtggcccttgcctgtaatcccagaactttgggaggtagatgtagtggatcacttgaggccaggagttagagaccarcctgggcaacatagtgagatcccgtctctattttttttttctttgagacggagtcttgctctgtcattcaggctggagtgcagtagcgc

SEQ ID NO: 2842 - DNA, 179 bp, Homo sapiens
actaaagctggagtccagataggaaacaaccaacccaaattttagagttaaatttttctttctcgctcttttttttttcttttttttttyttttttttttttttacagggtctggctttgtccctcaggctggagtgccatggcacgagctcagctcactgcaacctctgcctcccaga

SEQ ID NO: 2843 - DNA, 179 bp, Homo sapiens
ggcagggacaaagctaagtcctgagaagtaggccgaggctagatcattcgttcgttggacatcgggcatcgtttgggttttattcaaacygttggaaaaccttgaagttctaggcaggggaacagcaccacgtgattggatcctccagagtagaatctagacagtccccctccaaccca

SEQ ID NO: 2844 - DNA, 179 bp, Homo sapiens
ctttattaagcatgtaattatgtgccaggcactgttctaaactgtctacttacatatttctcacaatgtctttatgcattaggtactttycacgtgacagataggaaaactgaggcacagagaagctgagtaacctgcccaaggtcacacagctagaaagagctggttgcaggacttaa

SEQ ID NO: 2845 - DNA, 179 bp, Homo sapiens
tatttctcacaatgtctttatgcattaggtactttccacgtgacagataggaaaactgaggcacagagaagctgagtaacctgcccaagktcacacagctagaaagagctggttgcaggacttaaactcaggcagaggcacccctaaccaccaatatgcatccctctgcccttcccagc

SEQ ID NO: 2846 - DNA, 179 bp, Homo sapiens
atttgtttaattttaaactgaaatgaacaggggaaagtatctgccaggggagagaggtacagaatgaatgggattggtactgagttgctkctggtaacccatggaggaagaaggcaggatgcaggatctgatgtttaatggattcttcgagtctgatgacagcagcttcattccaggct

SEQ ID NO: 2847 - DNA, 179 bp, Homo sapiens
attagacaggtttgtccaaaccctgtgtgccctggatgggctttggactgcggtgaatctcatcaccatgaaccatgtttccctggtggytgctgctaattgttctgtggaatgactgggctttcccggtgctctggcagacagaggatggacaggcaggccacatatggggaaatagg

SEQ ID NO: 2848 - DNA, 179 bp, Homo sapiens
tatctacataagaaaaatgtgtgcatctggtttaagtgcagtgattattttttgtttgtttctctttatgcctgatttcttttgggagtrgatatgagacagattgttttgaaactaaagacaagtttcaatcttctactctcagttatttgctgtgtgatcttggaatggccacttaa

SEQ ID NO: 2849 - DNA, 179 bp, Homo sapiens; identical to SEQ ID NO: 2731

SEQ ID NO: 2850 - DNA, 179 bp, Homo sapiens
agtgagctgagattgtgccactgcactccaccctgggcaacagagtgagaccctgtctcaaagaagaaaagcaaatttagccggctgtgktggcatgagcctgtcatccctgctacttgggaagctgaggtgggagaatcacttgaagctgggaggcagaggttgcagtgagccaagat

SEQ ID NO: 2851 - DNA, 179 bp, Homo sapiens; identical to SEQ ID NO: 2733

SEQ ID NO: 2852 - DNA, 179 bp, Homo sapiens
ctcgggtatctaaggaacagaggtgaatcctgacaagtcgagacaaactttctcctgaggaaaaagagaagatcctcccccaccctccamcctgccgctataggcagcctgctccaaagtcattgtcaagctttgaaatgccaaaaccagtgcctggattttgaacctcatggggtctg

SEQ ID NO: 2853 - DNA, 179 bp, Homo sapiens
ctaattttgtgtgtgtgtgtgtgtgtgtgtgtgtgtgtgtgtgtatttttagtagagatggggtttcaccatgttggccaggctggtctygtactcctgacctccagtgatccacccacctcagcctcccaaaatgctgggattacaggcatgaaccaccccacccacccaggagtttt

SEQ ID NO: 2854 - DNA, 179 bp, Homo sapiens
gccacaccatgggttccgaaacaaggtcactcagtaaaaaaggtctattggttatatgtgtgtgtgtgtgtgtgtgtgtgtgtgtgtgtrtatacacagttatatgcatgtgtgtattttatatatatatatatttttttttctttttccttttttttctgcagggaaaatcccaactc

SEQ ID NO: 2855 - DNA, 179 bp, Homo sapiens
gcctgggtgacagagtgaaaccctctccaaaaaaaaaaaaaagttacagcttctggatgtaacagctgtggtcatcatcttcaccttgaygataccccctaagtccaagcataggagtttttgagaagtgtatttcaatataataggtcttctttgaaatcttatgcattttattttat

SEQ ID NO: 2856 - DNA, 179 bp, Homo sapiens
tccaggcctgttgcaaggatgaaatgaggtaacgtgtgtgtactgattattattgctgcataacaaatgactcccaagcttaagctgggytggctgggacaacctggcttccaaactatcccatctgttctctgtgtgtgatgttaaatccaggccagccaaagtggctcacctgcgac

SEQ ID NO: 2857 - DNA, 179 bp, Homo sapiens
ttccaccagctgaacccctgggcttctagctggggccaaaacgttggaagtgagagggcggaaaaaactaaaatgtcataggttcctggragctgggcagggttgaacccagaaagagcgaagatctctctgcctgcggcgtctccacctgcagtccccggactgcgctcggccttggc

SEQ ID NO: 2858 - DNA, 179 bp, Homo sapiens
ttttttttttttttttgaggcagtctagctctgtcacccaggctggagtacagtggggcaatctcgactcacagcaacctctgcctcccrggttcaagcaattcttctacctcagcctcccaagtagctgggattacaggtgcctgccaccatacccggctaatttttttatattttta

SEQ ID NO: 2859 - DNA, 179 bp, Homo sapiens
tctggtctctgcagactctgcaggtttgggggtgcgggtgctgctggaattggagcgttgggggtcgccgaggggctttcagaaatggakacaggaagaaataaaagtagagaaggggcgtaactttcctttctctctttcacttactccttccccacacatagttcaactttgtgatt

SEQ ID NO: 2860 - DNA, 179 bp, Homo sapiens
agcataactcccctccaatatctgtttctttggggagtcaggcatgggagcctacctgtctcctacttccaaatagaggactggcccccyaccccaaaggggatcctgtgggaaaaggggaaaggtgtgtgatttccttttgttcttgccccggcatcctgagaggatgtgaatttcct

SEQ ID NO: 2861 - DNA, 179 bp, Homo sapiens
tcttctggtcccctgaacatccccctgtcacaacaccacactgcattgccattacttactgactcatttctctccattaatagtaaattmtttgtagtcagcaactgtgtcttattcaccattacacagcctgggctttgacatacactgggcattagattatctacccaaagacttgg

SEQ ID NO: 2862 - DNA, 179 bp, Homo sapiens
ttcttccagtgcgtgataccagcagaagttcagagcacagaaggaaaataaaatcagggtgttaattctcctagccttgtagcttcctcrctgcagtgctgctattgattagtggggtctctccatctatagttgacaggtgacacctggcagatgtgtccctcttcacatagcctgtc

SEQ ID NO: 2863 - DNA, 179 bp, Homo sapiens
gaggggttcagggtagaggatataaagtgagaagtggtcagggtacagtgagcttctgacagatgcacctgtgacatcactctgccatcyctggtgacactgtggatgttcactaagtgttgatcaactcttaaactgaatgctgctcaaaagaaagaagttaacaaatcttagacaca

SEQ ID NO: 2864 - DNA, 179 bp, Homo sapiens
accctgtttcaaaaagaaaaagaaaaaaatatagggaacaagtgaatgagcagcgaggggacttgcaaggtaatatctggcacatggagrtgctctatccctaggaagctggctgtcttttctctcccagaacatcgagtccctctcagtgtcaccagacctcaaagtcccccggctag

SEQ ID NO: 2865 - DNA, 179 bp, Homo sapiens
gtatcaattcattttattgccttgaccactctaagaggaaggtattgttattatccttattttacagatgaggaaattgtggagcaaaargattaatgatgtgttcaagggcacatggttaggaaatagcaggatttgaagccagggagtctggctcacactcccagcctcctatgcat

SEQ ID NO: 2866 - DNA, 179 bp, Homo sapiens
attaatagggttattaataataggataaatcccagaggccaaaggcaggaagaggaaggacacctcgagaaagctggaattgagaattasggagtaaagggcaccatttctgcccctatctggggccctgtggcctttctcattttttctcccttgtggagtctgctgtatcctccttt

SEQ ID NO: 2867 - DNA, 179 bp, Homo sapiens
gtggtgactcacgcctgtaattctagcactttgggagggcgaggcgggtggatcacttgaggtcaggagtttgagggcagcctggccaasatggtaagatcctgtctctacaaaaaaatacaaaaattagctgggcattgtggcgctcgcctgtagtcccagctacttggaaggctgag

SEQ ID NO: 2868 - DNA, 179 bp, Homo sapiens; identical to SEQ ID NO: 2761

SEQ ID NO: 2869 - DNA, 179 bp, Homo sapiens
gagatagagtgaaatgggagaactagtcaatgtgatttgtggccagcagtggacagaaaaccaaatcaatgtaaattaatttcatttggytttgttttagagacagggccttgctctgtcacccaggctgtagtgcagtggtgtgatcatggttcactgcagtctccaactcctgagct

SEQ ID NO: 2870 - DNA, 179 bp, Homo sapiens
gtatgtatgtgcgtgcgtgtgtgtgtgcgtgcgtgtgtgtgtgtgcgcgtgcgtgtgtgcgtgcgtgtgtatgtgtgtgttcagagctgyggggggtgtctgtttggacttgtgcggttgtctgtttatgtctgtgtacatcggtgtggctctgtaagaacttttctgtcatttccttc

SEQ ID NO: 2871 - DNA, 179 bp, Homo sapiens
cttgaagggaagtatggggtagaatagaggtgggcagggggaatttcttgttgcgaggaactgaaacggaagtgttggggatgggatggwggcagtggagaggagagggtagccttggtttacatcattttgtttgaaatcagtcttgatttccttgacgccaggaggaaatccatccc

SEQ ID NO: 2872 - DNA, 179 bp, Homo sapiens
tgagcccccagaatctgatccagatcccggacatataaaccacgccaagaagacaggggctgtctctagcacattctctcgagggagtcyggggccccttcccagacgcaactgcaaaaggaagggctaacgccatggcgggcccgtggtttattttatatccgacaaagtgcacggca

SEQ ID NO: 2873 - DNA, 179 bp, Homo sapiens
agaatgcgtaggtgtatgtgaacgtgttcatgtgtgtgtacgtttgagtgagagtgtatgtgtgtgtgtgcatatttgaatatgcatgckttggtgggtagtatgcacaatttacggcaaaagagatgccaaccacctctgctattggtctccaattcaccacctgattccctcctctg

SEQ ID NO: 2874 - DNA, 179 bp, Homo sapiens; identical to SEQ ID NO: 2765

SEQ ID NO: 2875 - DNA, 179 bp, Homo sapiens
ggggatgctggggcagggctattgatacttatttgtgtacctaacagtgggcaggaaagcaagatgagcagttcattggttttgatgccrgaaattctttggacatacaaagatctcacgatggaaaatactctcttcagcaattgcagtgctcctaatccccagcatggcatcttcct

SEQ ID NO: 2876 - DNA, 179 bp, Homo sapiens
tggtggtttcattagtaaccacttggccatacttaggaacagcattgaacagaagaccaaaggaactgtcttcctgttccaccatcaagrtgggggtgagggagaaaataggaggaagagatggaaacagaaagtgtgaccagtatctctccccagcctgagctgggctatgatagtcc

SEQ ID NO: 2877 - DNA, 179 bp, Homo sapiens
aaatctcccagtcctcgggggagccccagcctcaaaggtccccagggcccgtctcagctcaggccctgccacccccgcagcgcaccccgmccctccccccccccgcgactccgcaccaacatactctggttgtctgtcttccctcccacccccggagacatcgcagaggaggctgtagg

SEQ ID NO: 2878 - DNA, 179 bp, Homo sapiens
tgcccctccagactggatgacacagcaagaccctgtctcaattaaaaacaaaaacaaaaaacaaaactccaacccaaaaccaaatgaaaracaaaacagtcgtgggttaaatgaacacatcaacttcccactccaagttgagagctccttttattacacctaaaagtttttctggacca

SEQ ID NO: 2879 - DNA, 179 bp, Homo sapiens
gcaacctctgcctcccgggttcaagcgattctcctgcctcagcctcccaagtagctgggattacaggtgagtaccaccatgcccagctamtttttgtatttttagtagagatggggtttcaccatgttggccaggctcttctcgaactactgacctcagatgatccacccgcctcgacc

SEQ ID NO: 2880 - DNA, 179 bp, Homo sapiens
tggtcagcattattaaagtggggcacatctgttcttggctgttagcacggagaagaggagggggtcgagtgagaggagaaatccccaaaygcttggactgatcccacctagtactaagagcaaattgcctctaagttggcatcacggagaagtgcttcatgaaggggcagagattcctc

SEQ ID NO: 2881 - DNA, 179 bp, Homo sapiens
gtgcacacctgtagtcccagctactcgggaggctgaggtgggaggatcactggagcccaggaggtcgaggctgaggtgagttgtaatcayaccactgcccctccagactggatgacacagcaagaccctgtctcaattaaaaacaaaaacaaaaaacaaaactccaacccaaaaccaaa

SEQ ID NO: 2882 - DNA, 179 bp, Homo sapiens
ctgtcaaagaacgacatgaatcctgctacagagcttagatataataaattcattttatgtgttttgcccactccttccctttaaatcccyccctcccttgggtcactgatttgagggcaaaggattgggaaaagggtagggggctatattgttttctctctaaaagcaagcgttcaaaa

SEQ ID NO: 2883 - DNA, 179 bp, Homo sapiens
tgcactccattctgctttcttttctttttctttttcttttttttttttgagacagactctcgctctgttgcccaggctggagtgcagtgkcatgatctcagctcaccgcaagctccgcctcctgggttcagccattctcctgcctcagcctccctagtagcagggactacaggcgcccg

SEQ ID NO: 2884 - DNA, 179 bp, Homo sapiens
tttctttttcttttttttttttgagacagactctcgctctgttgcccaggctggagtgcagtggcatgatctcagctcaccgcaagctcygcctcctgggttcagccattctcctgcctcagcctccctagtagcagggactacaggcgcccgccaccatccccagctaattttttgta

SEQ ID NO: 2885 - DNA, 179 bp, Homo sapiens
attacaggcgtgagccactgcgcccggcatttttttttttttttttttttgagacagagtctccctctgtcaccaggctggagtgcagtrgtgtgatcttggctcgctgcaacctccgactccctggttcaattgattctcctgcctcagcctcccgagtagctggggttacaggcacg

SEQ ID NO: 2886 - DNA, 179 bp, Homo sapiens
ggttggtgctaggattcaaatctaggttttttttagtcctggagttttattctggctgcattctacgctcttacaatcccctttccaccytgccattttgcaacctctttggtctggggagtcttggtccctgtttcccacaatggacagttttctctccttgttagccaggggtgatg

SEQ ID NO: 2887 - DNA, 179 bp, Homo sapiens
tagctttttttaacctccccccatcaccaccaaaaaaaataaaaataaaattgccaggcctttctgaagcagatttatggtattgcttgkcaatcatgtttcaaactatggagatcagaagccccttctttggggatgtctccaaattggctggcaccgctaaatataggccaaatgaa

SEQ ID NO: 2888 - DNA, 179 bp, Homo sapiens
cacacccggctaaattttttttatttttaatagagacagtgttttgctatgttggccaggctggtctcaaactcctgacctcgtgatccmcctgcctcagcctcccaaagtgctgggattacaggtgtgagccaccgtgcctggtcaaaaaagtttttaataattttttttgaaaataa

SEQ ID NO: 2889 - DNA, 179 bp, Homo sapiens
gaaatgtcctcacctgctgcagaatcaggcatcctctgccaaggagggctgggaggcatggaggcctctcagacatggaaaggggcccgygtgtgtgcatgcgagtgtgtgtgtgcatgtgagtgagtgtgtgcatgtgagtttgtgcacatgtgtgtgtgtgtgcatgcgagtgtgtg

SEQ ID NO: 2890 - DNA, 179 bp, Homo sapiens
ttcctgaagcagttaactcttttcctccctttccctgaactctctctttgcctgttcaacttctgttgttttgagcagagaaccccatcyccatgactgtgtcatttcccttctctggaaggtccatctgtgctgggggctgcccatctgcacattcacccttcatctgtcatcaaggg

SEQ ID NO: 2891 - DNA, 179 bp, Homo sapiens
gtagtctgaaggggccatctcagatcaaacagggttacctcctcaacttcactcataattggaacagtgctttcttttcctgaagcagtyaactcttttcctccctttccctgaactctctctttgcctgttcaacttctgttgttttgagcagagaaccccatccccatgactgtgtc

SEQ ID NO: 2892 - DNA, 179 bp, Homo sapiens
tcccagtctccagcagagaggccttcacaatttatgtccatttaacccaaataaagggagggcagtggggcatctttgtaaacccttgtwattgcacaggtcataatagatgcagggctggcaaatgacggactgagtcagattcttccagggggcatttcttcggtggccagtggtta

SEQ ID NO: 2893 - DNA, 179 bp, Homo sapiens
aggttgcagcgagccgagatcgcagcactgtactccagagtgggtaatagagtgagactctgtctcaacaaaaaagaaaaaaaaaaaaamaaaacctattttatagggttatttttatgattcattgggtgagtatttataaagtgtacagaagactacctgaaaataaatgcttgaat

SEQ ID NO: 2894 - DNA, 179 bp, Homo sapiens
ctactctatcctcttaccatatattttctccttctaatctattatgcattcatttggatttttctttctttgtggtcagacttcccccaygagggcagcaattttccttgtgtttttcccccagcttctagaatatctcctttcacatagttggtactcaataaatatttgatgaatgg

SEQ ID NO: 2895 - DNA, 179 bp, Homo sapiens
tagtttggcacattacaaaatgtatctagtatggtgaatgaagaaagtgaaagtgtttgtctatcccaagaatgagaccttaggtaagtracaaccctgtaagcttccatttcctcatccataaaacagggataagaatattttcctacacacctcacagggctatattgggaatcctt

SEQ ID NO: 2896 - DNA, 179 bp, Homo sapiens
tgtggtcagagggaaatatattttaagaatttctcctgcatcttttcagatacattccaccaaggattactacaggtgtcatgaaaagtwggcttttgctctttcccagtaagaaggaggcagactttggcagcagagtcagctccatgggtatgggagccagaaccagcctcagccaa

SEQ ID NO: 2897 - DNA, 179 bp, Homo sapiens
gtattcatttcttttgcttttggaaacacatagaaggttctggaattatagcagagatttattcatctttgccacccttggaaatgcacrgagcactggagcactatggaagcatagcttcagggatgctgaactcaactggagacctgcagggtggtcaggagagcatagctgctgaa

SEQ ID NO: 2898 - DNA, 179 bp, Homo sapiens
gaccaagggacacctcgtgaaatacattccatctagaggcaatttggttgagagggccaattgtgtgtgtgtgtgcctgtgtgcgtgcakgcgtgcgtgtttctccttgtggcatactggtggtctttttacagatacagagttctggtttttggaaatgcgtttattcctttagcctt

SEQ ID NO: 2899 - DNA, 179 bp, Homo sapiens
gctacctggatggcacttccaaaactgcactccagcctgggtgacagagctagaacctgtctcaaaaaaaaaaaaaaaaaaaaaaaaaawagaaggaaatcagcacaaagctgatctttccaggccacaggaagatttgctttctctatagctcccttccttacatacacaggtgcaca

SEQ ID NO: 2900 - DNA, 179 bp, Homo sapiens
agtacctgaaggctccaggctgactctcccgcgtggtcacttggcccacatctgtgccatggagagcccattctagcagttccctgacckctggaaatgcaggcctctatccaaagtgactgtgcattctagctgcatctcagcttgtcacaatccctcctgatgatgagacttcaagg

SEQ ID NO: 2901 - DNA, 179 bp, Homo sapiens
tctgaccctgcactgcagtaatggcggggaggcacacatgctggatgtcaggtctgtcccgtatttgtatattgtcatttgatgggtcayttaaaactctaagctattaaaataaatggtattcttatcatgatatgaattctattcttagctcatcgtagtgtacatgtatttaaaca

SEQ ID NO: 2902 - DNA, 179 bp, Homo sapiens
tttaattcaataaatgtgtaccaagggctaattctgtgccaaggaccctgtccagcactaagactagtccaaggtaaattctttcttcaktctaaaacctctgaattcatctgtagaacataccacagaggtttatcatcatttcttacagcaaacacagtactgaggagaacaatatc

SEQ ID NO: 2903 - DNA, 179 bp, Homo sapiens
gagaaagctggaattgagaattacggagtaaagggcaccatttctgcccctatctggggccctgtggcctttctcattttttctcccttstggagtctgctgtatcctccttttctcacctagtctgtcattcctcatagtggcaatggccatggtctcattactccccacatcctgac

SEQ ID NO: 2904 - DNA, 179 bp, Homo sapiens
cttgttgaaaatttgctgcaaatgcatgggtttatttctgagctctatgttctgttctattggtctatgtgtctgtttttatgtcagtgscatactgttttgattactatagctttgtattatatttaaagtcaagtaatgtgacgctttcagctttttttttttcttctcacaattgc

SEQ ID NO: 2905 - DNA, 179 bp, Homo sapiens
ctgctgtgtcgccggtacttaccacatgtccagtctaaagcaagcacccaccaaatacattataggactgtaacaatgtgcattgtgtgmcttgccatggttttatcaacaccatgatgaaactacattaactcttggacattgcatccttaatcctactgattcagtgaaaagatcca

SEQ ID NO: 2906 - DNA, 179 bp, Homo sapiens
ctctgatccttgctccagaagataatctcaggtttggtaatgcagtgtcccaaggataccaagctgctgtaggtctccagcatcatgtcyctgtacagggtctgctaagcatcatccagatctggtcactcctcccaagtgaagtccttagccacatcctcaaacaacaccaacaccag

SEQ ID NO: 2907 - DNA, 179 bp, Homo sapiens
agtgtaagcaaggatatgaagaagagaacccttgtacactgttggtgaaaatgaaaatcagtgcaaccactatggaaaatagtatggagrcacctcaaaaaatttaaatcagaaataccatacgatccagcaatcctacttctggatatatattcaaaggagttgaaatcagggtcttg

SEQ ID NO: 2908 - DNA, 179 bp, Homo sapiens
ccccccaccaccaagcccccagagcctcctgaaaccactgatctgtttcctgtcctttagttttgctttttctggaaagtggttaaaagrgaaacatacagtatgcagcctcccgtgcctggcttttttcacttagcccagtgtggttgagatctatccatgttcttgcaagtatcact

SEQ ID NO: 2909 - DNA, 179 bp, Homo sapiens
gacattccattgtgtgtgtgcatgtgtgtatatatatatatgtatgtgtgtgtgtgtatacacacatatatataattatctttacttttwaaaaaaaactggctgggtgcagtggcttatgcctgtaatcccagcactttggcaggctgaggtgggccgatcacatgaggccaggagtt

SEQ ID NO: 2910 - DNA, 179 bp, Homo sapiens
gttttctcttgcccccattatgatgataatcatgatgattattttggtaccaagaacacttaacataatatctaccctcttagcaaattktaagtatacaatacagtattgttagctgtcagcactatgctctatagtagatctctagaacttacttattttgcacaactaaaattttc

SEQ ID NO: 2911 - DNA, 179 bp, Homo sapiens
tggagtaataaggctacggctgctgctgctaacaaaaaacagtaacagcaaacattcactagacctttatcatgtgcaaagccaaatatytacatgggctatgtcatcgaatcctcagatcaccctataaggtaactgctgttttagacccatttaacagttgaagacagtaaggttga

SEQ ID NO: 2912 - DNA, 179 bp, Homo sapiens
aggtgcttcagaagagaatgatttgtgtatcaaaggattaagagaggcccttaggaaaattgatgaagccctccagtatttctgaaaaawtaccctctttatgatcctgctgcaaaaagtccaatgtgaagggaacatgtcatcttatggtatcatataatttatgtaaatatatagtt

SEQ ID NO: 2913 - DNA, 179 bp, Homo sapiens
tacttgggaggctgaggcaggagaatcacttgaacccaggaggcggaggttgctgtgagccgagatcataccactgcactccagcctagsgacagagtgagacttcatctcaaaaaaaaaaaaaaaaaagaaaaaaaaagatatcaccatccctcaacagcatacccggaagtcctttt

SEQ ID NO: 2914 - DNA, 179 bp, Homo sapiens; identical to SEQ ID NO: 2817

SEQ ID NO: 2915 - DNA, 179 bp, Homo sapiens
tccatccaccttgacctcccaaagtgacattacaggcgtgagccagtgtacccggccttctataaaaaatttaaaaaattagccaagcayggtggtttgtacctgtagtcccagctactcaggaggctgggacaggaggattacttgaactcaggaggtcaaagcttcagtgagctgtg

SEQ ID NO: 2916 - DNA, 179 bp, Homo sapiens
atcccatatggacccccctcccactttgcccttccagagccttctaagcccaaatcactgcttaatactcctaacagtctacaaccgcaygagggcaggggcccctcccccagcacctattgctcgcctctccagattctagaacttttcataccaaggcttagaacattaaatccctc

SEQ ID NO: 2917 - DNA, 179 bp, Homo sapiens
tgtgaaacaataaaaaatgtgtgagagctgaagtgtctggagggcttagtcaagaaatactatttttttttttttttgagatggagtctygctctgtcgcccaggctggagtgcagtggcatgatctcggcttactgcaacctctgccccccaggttcaagcggttctcctgcctcagc

SEQ ID NO: 2918 - DNA, 179 bp, Homo sapiens
aagattttcaatcagtacattgaagtaaaaagaagggtatgtgcaagcagaaccagagagttgtccctcaatgtcagtttttcttttccrctgtattgacagaacaattgaattttagctgggctgcccagttcccacctcccttgcagctaggtgggaacatataactaagttctggc

SEQ ID NO: 2919 - DNA, 179 bp, Homo sapiens
acagaaataacaagaacaataaaaacccaaattgtacccactattgacctcctagtgaacaccttttttttttttttttttttttgagayggagtctcgctctgctgcccaggctggagtgcagtggcgcaatcttggctcactgcaagctccacctcccgggttcacgccattctcct

SEQ ID NO: 2920 - DNA, 179 bp, Homo sapiens
aaaccattgagagattaagcgctgtgatcagatgcatgctgtgaaaagaacacttggggagctagaatggtgggcaggttgaccactgaygagggatacgctgaaagtccagaagccaagagggaggtttattcagcagtccaatgaagaagcgacaagcatgcaattgacaccaaggt

SEQ ID NO: 2921 - DNA, 179 bp, Homo sapiens
tgtgagttccacaatcatgccgttgatggctaccttatgtatcacccaagcatggcaaatgcagttacccaatgacatccatgcccaaartcgaacttatttacagtaactacacctgcttctccagtaagaagctcctgtgtaattgagtggaccaggcaggaattagatctgggccc

SEQ ID NO: 2922 - DNA, 179 bp, Homo sapiens
cattagtaagagcttgagcctgactttctacagatctagtttcgaattctggctctgtcaattcttaaccctgggaccttatgcaagggwattcgccattcaatgtggaaagaatggccagagactttgtaatattcacagagctagaaattgagctgggttctggtcttgcttctttc

SEQ ID NO: 2923 - DNA, 179 bp, Homo sapiens
ctcagcctccacagtagctgggactactggcacatgccaccatgccccactaattttttgtatttttagtagagacggggtttcgccgcrttagccaggatggtctcaatctcctgacctcgtgatccatccgccttggcctcccaaagtgctgggattgcaggcatgagccaccgtgc

SEQ ID NO: 2924 - DNA, 179 bp, Homo sapiens
atagttcagataatatagttcagaagatagttcagaggacccccccagagtcatagattaaacagggtagacacttatttctcttgcacrtaagagactgggctaatctggcagctctgcatcttggagtgttcagtggctggggtctctctttttttctttgtcatccttagggtatt

SEQ ID NO: 2925 - DNA, 179 bp, Homo sapiens
aatcttttccatgtttcatctcagctaatgggcaaatctccaatttgggataattttgtgttcagtttacaatacaggaggcaactgagkacatgagagttgaaattgtttgttccaggtcaccaactgagtcaattatgtggggaatgagattggaatgggtattcattttataagtg

SEQ ID NO: 2926 - DNA, 179 bp, Homo sapiens
ctccacagagctaatcaatggccaggctaggcttagcattaataagtctggagtcttgcacttttgacctagctgttagataacaattcytttagctcggccgtgggttattaagcacgacgagtcaatttgataaatagatgacgttttatttatctaaatttctgggggaatggtgt

SEQ ID NO: 2927 - DNA, 179 bp, Homo sapiens; identical to SEQ ID NO: 2730

SEQ ID NO: 2928 - DNA, 179 bp, Homo sapiens
gttcccctggctggttttcatctccttttccatagctttccccttcccacgccagggatgccacgtggctgctccatcatttatagtgayggccaaataattgaattgttattggtttggagcggggtgagggagggggagagatttttgctaaattgtttcactttagataatgttca

SEQ ID NO: 2929 - DNA, 179 bp, Homo sapiens
cattgcatgtgcttaaaataagcaaaatgccatgagtttggttttgtttttcaagtatcaggaaggaaagaagagaggaaatgaataaayttctttttaatatggagtttttaagaaatatttgtgactatataacatttcaaatggagtcctaagaatatattagattaaaatatatc

SEQ ID NO: 2930 - DNA, 179 bp, Homo sapiens
tctgggctggggtctacctgtctgtattttaaagagcccttctggtgattccaatgcatgcttaagtgtgagaatcactgttctaagtcrcctgaagctcacttccaagagggtcattgtcgatcatcattagttattgtcagcatcactgtgtgctgaccatgtgcaaaacacgtgct

SEQ ID NO: 2931 - DNA, 179 bp, Homo sapiens
atagcacacaccatgtgccaggcaccatgctaggggctgggtgctgaggatacagcactgacaatgtaaataaggctctgaaagtcttgscatgtacttccagtgacttgagaggaggtagagcttgataatagctggatggtacaggatgatgttatggggaagcatctggggctagc

SEQ ID NO: 2932 - DNA, 179 bp, Homo sapiens
ctggcaattagatctccctaagaggggcaggtatatgatgcgtgctttaaaacagagagagctaaattctagtcctagctctgccacttmattgcagagtaacacatgacaaattaatgtttctgtgcattagtttctttatctgtgaaatggggatgaacatcatagcaccctcttca

SEQ ID NO: 2933 - DNA, 179 bp, Homo sapiens
caataaaaacccaaattgtacccactattgacctcctagtgaacaccttttttttttttttttttttttgagacggagtctcgctctgcygcccaggctggagtgcagtggcgcaatcttggctcactgcaagctccacctcccgggttcacgccattctcctggatcagcctcccgag

SEQ ID NO: 2934 - DNA, 179 bp, Homo sapiens
tatttaatgttgtggcaggaaagaggaaaatctccgtagaatatagttcagataatatagttcagaagatagttcagaggacccccccaragtcatagattaaacagggtagacacttatttctcttgcacgtaagagactgggctaatctggcagctctgcatcttggagtgttcagt

SEQ ID NO: 2935 - DNA, 179 bp, Homo sapiens
caactggcagtgacctgtctctccaagatggttgggcaatagctggtgatgtctttgtcaccactggggattgcagtggggtggggaggrggcagtgtatgctattagtatctagtgcatagaagacaaggatactaccaaacatcctacaatgcatagtacaccccaacctcccccaa

SEQ ID NO: 2936 - DNA, 179 bp, Homo sapiens; identical to SEQ ID NO: 2737

SEQ ID NO: 2937 - DNA, 179 bp, Homo sapiens
gctggttccttttgaatgtgacttcttgatccttcttccccaaggggaagaagatgaaccttaaaacagacaggacaaagcccaagaggkggggaggagtgggtggcatcaatgacagcagttctaggagtttctctgtggcaaaattagtatggcgtttttttgctcagcattgttcc

SEQ ID NO: 2938 - DNA, 179 bp, Homo sapiens
aaactgcggaatgcctcagcttagtagatttaaatgggggatgagacggggaaaatcatttgtgatgtgtgtgtgtgtgtgtgtgtgtgkgttggttttgatcaggaaaaaaaaaaaaagagttcaaaatccacctgggagaaacactgacacatatgccagagaagcattgatagtca

SEQ ID NO: 2939 - DNA, 179 bp, Homo sapiens
cctattttcaccaaaattggggaaggagtgccactttccagctccacttcaaattccttaaaatataactgagattgctgtggggagggrggagggcagaggctgcggtttgactttttaatttttcttttgttatttgtatttgctagtctctgatttcctcaaaacgaagtggaatt

SEQ ID NO: 2940 - DNA, 179 bp, Homo sapiens
taaagtgaccatttgcttagccagatgtgcctgaacattttggaactctgagtcaagagggcggttcctgcttcaaggagagagctggtkccaattctaattttcatttctagatctggatatttatgacaaagacctcatcaacctggaagtgtaactttcctgctttcaactctgag

SEQ ID NO: 2941 - DNA, 179 bp, Homo sapiens
cctgccccagcaggcccccagattggtctgatgatgtcacaggggtaaccacggcaacaggccgtgacatcatgacaaaaggaggactgrccttggcctggaattcaaagcaaaagcagctcataaacttctaaagcaagcaggagataaatatccttagtcataaaagaacaaacgaa

SEQ ID NO: 2942 - DNA, 179 bp, Homo sapiens
ggacctatctccaatttttttttttttttttttttttttttttttttttgagatggagtttcgttcttgttgcccaggctggagtgcaayggcgcgatctcagctcaccgcaacctccacctcctggatttaagcgattcttctgccttatcctcctgagtagctgggattacaggtgc

SEQ ID NO: 2943 - DNA, 179 bp, Homo sapiens
gacctcaaagtcccccggctagcctggtgctcttagggacactactgggatatcacaagttagacatcagggctgcaaggtgggattccmtcaggggaggcatgaactgtggagaggatcaaagggagctggggccttggattcactggcaggactgccagtagggcccacaggcctca

SEQ ID NO: 2944 - DNA, 179 bp, Homo sapiens
acaataggagacgagtggtggagctaggttttagttccgctcagaactaatttatttgttcccaaactgggtgaaacagtggaaacaaaygttaactctcaaaagcgtctgagagctggaattgaggctcaggccagagacctctggacctctgccctctgtgattatatgggcatttt

SEQ ID NO: 2945 - DNA, 179 bp, Homo sapiens
tacaaaaacttagctgggcatggtggcatatgcctgtagttctagctacttggaagttgaggtggaaggatcacttgagcatccgggagrtccaggctgtagtgagccgtgatcgcaccactgcactccagcctgggtgacagagcgagaccctgtttcaaaaagaaaaagaaaaaaat

SEQ ID NO: 2946 - DNA, 179 bp, Homo sapiens
caaaggcaggaagaggaaggacacctcgagaaagctggaattgagaattacggagtaaagggcaccatttctgcccctatctggggcccygtggcctttctcattttttctcccttgtggagtctgctgtatcctccttttctcacctagtctgtcattcctcatagtggcaatggcca

SEQ ID NO: 2947 - DNA, 179 bp, Homo sapiens
actacagatccacactgagggggacaaaactgagccacggagatttgaagtgtcttccctcaaatttcccagctggcaagtaggaggagrgggccaggttccatatctactggtcatctcacttcagggtccataatggaagcttgtgggtgatgcttcataaccctccacagaaggta

SEQ ID NO: 2948 - DNA, 179 bp, Homo sapiens
catctcttacgggaatccttctctggttttgacaaagatgtgtgctctacactcttctggtcccctgaacatccccctgtcacaacaccmcactgcattgccattacttactgactcatttctctccattaatagtaaattctttgtagtcagcaactgtgtcttattcaccattacac

SEQ ID NO: 2949 - DNA, 179 bp, Homo sapiens
ggaatgccaacctcatgacctctgttgattaaacctggcggaggcccatgcacatgtctgagagtctgttatgtcccaggtgaggtcacscaagtttgtagtctgggccttggggtaaggcttctaaaactttcttctcacctctgccttagagatctacttctcttacttctcaacat

SEQ ID NO: 2950 - DNA, 179 bp, Homo sapiens
ctgtccatgacttttttcagattctcaaagaaattcaaatacgaaaaatttacaacctctgctacggacctcatctctctctctctctcwcacacacacacacacacacacacacacacacacacacccctgaaagatggctaccttcactcagacgtggcatgaagatgctgggatat

SEQ ID NO: 2951 - DNA, 179 bp, Homo sapiens
gtagagatgaggtttcaccatgttggccaggctggtctcaaactcctggtctcaagtgatcctcctgcctcggcctcccaaaatgctggkattacaggcgcaagccaccgcgcccagcccttatcttctcttcttctaaggacactggttatgttggaatatggtctatcctaaaggcc

SEQ ID NO: 2952 - DNA, 179 bp, Homo sapiens
tcctgacaattttagagacaacctttgaggtcactgaggacttgcataggaagggttttccctggggaacctggatgggggccagagtcmgggatctcagagttctgggtcccaggaacactatccatggcttctaggccagactcatcagagtgctgtgttctgaaaggagctggttc

SEQ ID NO: 2953 - DNA, 179 bp, Homo sapiens
cagggaaaacccttcctatgcaagtcctcagtgacctcaaaggttgtctctaaaattgtcaggaatgtcgaatcagctcttgaagtcacmtatcattgtatgggtgagacaggattgttcattaattcaccattacatacaaagatgctccaggtttgaaggtagtaagggggtggctt

SEQ ID NO: 2954 - DNA, 179 bp, Homo sapiens
agtttcgtttgttaccaagtttgttaaaagtcatgacttagaattccatttctatcacttgctagcagtgcatttttgagcaaattactmaaacatttctacactttattttttatgcctaagatgacggtaattatagcatcaccttatgattttgtttttgtttgtttttaagatta

SEQ ID NO: 2955 - DNA, 179 bp, Homo sapiens
ttttgcaatttataagttacagttttatctaacagagaggagacaatctatttgtgtaccagataaaattaattatgctatggcattatygtgccaccaagcatcaaattgtgattagcacaagaacgagaggcaggccagggatgctttgaaggttgctcatagtctttctggattaa

SEQ ID NO: 2956 - DNA, 179 bp, Homo sapiens
ttctccctccatctctctctcccttccttccttttttcctctctcctttcctcccttccttcatttctccttcctttccttcctccctcsctcctttcttccctccctccctcccttctttccttccttcctccgcctctccctgtcttccttcctttcccctttccttcctccctccc

SEQ ID NO: 2957 - DNA, 179 bp, Homo sapiens
ctgactctcttttcagactcagcccacctgcacccaggtgaaataaacagctttgttgctcaaaaaaaaaaaaaaaaaaaaaaaaaaaaragaaatatctgatactgggtaatcgataaggaaagggtttaattggctcacagttctacaggctgtacaggaaacgtaatagcttcggc

SEQ ID NO: 2958 - DNA, 179 bp, Homo sapiens
atattgatttcctctgagtcactttggactgacctattaattcaggctcgctgagaaggtggaaaacatgcaagttgcacttggctgcayttttaatgctcccttactgggacaatccaatgtcttccaaatgaatgcatgggggaggggttcagggtagaggatataaagtgagaagt

SEQ ID NO: 2959 - DNA, 179 bp, Homo sapiens
gaaaaaacaataactgctcagaatggacttcaatgctgcttgatttcaggcagtggatccccaacatcatgtccaggaaccccagtggcrtgtgtcccctgcatgaggagatgcctatctataaggaatgaggcgttcagtagaactagctaaaccatggcatagatgttcagattaaa

SEQ ID NO: 2960 - DNA, 179 bp, Homo sapiens; identical to SEQ ID NO: 2781

SEQ ID NO: 2961 - DNA, 179 bp, Homo sapiens; identical to SEQ ID NO: 2780

SEQ ID NO: 2962 - DNA, 179 bp, Homo sapiens; identical to SEQ ID NO: 2779

SEQ ID NO: 2963 - DNA, 179 bp, Homo sapiens
cttaggttgtgcttctcggcacccagcccaaggcagctactgtaacccgtcctatgccctctttaaaaagtctatgactcagccgggcgytgtggctcacgcctgtaatcacagtactttgggatgccaaggctggtggatcacttgaggccaggagtttgagaacagcctgcccaaca

SEQ ID NO: 2964 - DNA, 179 bp, Homo sapiens
ttttgtatttttagtagagacagggttttgccatattggccaggctggtctcgaactcctgaccttaggcgatctgcctgtctcgtcctyccaaagtgctgggattacaggcatgagccactgcacctggcccctccatgtttttcaagtctgctcacatgatccttctcattaaggcc

SEQ ID NO: 2965 - DNA, 179 bp, Homo sapiens
gccttaggctccggtcatctgctgtttatatgggcacactcacttcccagatctcctctggaagaccctcatatccacattttgcagatkggaaaattgaggctcagactgatgcatgtcattgtaccaggtatctactgctctgtaacaaaccaccccaaacttagtggcctaggaac

SEQ ID NO: 2966 - DNA, 179 bp, Homo sapiens
tatctcagctgaaacagaagtggttgccttaggaaagatcttcacctgcagatttcattggagccaaggattctgagtgtatcctgtgawcccactgtggactatgtgtgagagagagctgttggctggtgtgggtcacctgtagtcaacagggacacatggaagggtgcacaggtccc

SEQ ID NO: 2967 - DNA, 179 bp, Homo sapiens; identical to SEQ ID NO: 2771

SEQ ID NO: 2968 - DNA, 179 bp, Homo sapiens
catggtaaaagtttagtctttacgaaagtagaaacctggctatgtggtttctagccacatagctatggcttcctcccatctgtggctctkccatggctaatgtgtggcgtccatcttgtgacccaacatggctgccccggctttagacatcaagactgcattccagccagtgagaagca

SEQ ID NO: 2969 - DNA, 179 bp, Homo sapiens
cattttgtagagtgttctgttctccgggaaaacatttccactcttcttgtcattcctttcccatcagagctctcagaggaaataagggcrggtggaagtattcccacttgaaaaataagcataacctcagaaaggttaagtggccattccaagatcacacagcaaataactgagagtag

SEQ ID NO: 2970 - DNA, 179 bp, Homo sapiens
caaggaaattaaatatgagcagcccacactttgcaataaaatcaaggttatgcaaaaaaggaattctgctctggcttccaggaatccccrtggaaaatgtatatgtgtccatttataaagaaaaaaattaatacaccaaacaatctcattaaaagaaacttccaaatgtgttccaacga

SEQ ID NO: 2971 - DNA, 179 bp, Homo sapiens
tgtctataaaatggggataataaaatagccacctctttggggttataaaatgaaatgatgcatggaaaggcttagcgaatatatatacayacacacacacacacacacacacacacacacacacacacacactggggacacattgctcaataaacactattttgtaaatatacattatt

SEQ ID NO: 2972 - DNA, 179 bp, Homo sapiens
gctggttcaacaggtggaaggatactcggaaaaatcctcctacccatttaaaaaggaatggtgtcttgaggggaatgagttttctttccragggcaggaagctctctctcgacctgggttcccagacaggctttgtggcctggaaaggactgtctatcacagcttggcctgttcacaga

SEQ ID NO: 2973 - DNA, 179 bp, Homo sapiens
agcggtgagagggaagtaacaagcataataacagctcatctctgtggcccctttcatctagggatctcagagtcatttaccaccacccarttaattttctcaacatccactacaccatcagctcccaaagaaggtgtcattatcgtccttttatgagcaagaaaacttagaggttagtt

SEQ ID NO: 2974 - DNA, 179 bp, Homo sapiens; identical to SEQ ID NO: 2806

SEQ ID NO: 2975 - DNA, 179 bp, Homo sapiens
tcttgcctcagcctctggagtagctgggactataggcacacaccatcattatgctcagccaatttttaacttttgttttttgtaaagacrgggtctctctatgttgccaggactggtcttgaactcctggcctcaagtgatcctcccacattggttttccaaagcgttggtattacagg

SEQ ID NO: 2976 - DNA, 179 bp, Homo sapiens
tacatttaaaaatgtatttgtagacgggcacagtggttcatgcctgtaatcccagcactttgggaagccaaggtgggtggatcacttgargtcaggagtttgagaccattctagccaacatggtgaaactccatctttactaaaaaatacaaaaattagcagggcatggtggtgcatgc

SEQ ID NO: 2977 - DNA, 179 bp, Homo sapiens
gaggttcagagaaggcttttatgtcccagcaggaaataaatgcacagtcaaaatgggtgagagagggtggaatgaaggggtcattacaamgctgtgggactgggtttagggaattgacagggatggcagagaaccccgaggctagcaagggggaaaattactaccactttgagacctaa

SEQ ID NO: 2978 - DNA, 179 bp, Homo sapiens
cacagttctaacttgccttcggtttgccaggaaaacctgcattcaaatcccagctcaaccgtacccttgctgtgtgaccttggccaaacratctctgagattcagttgcttctctgtagaatgaggaaaatagcagaatctgctttatagggtactgtatggattaaatcagatgtgtg

SEQ ID NO: 2979 - DNA, 179 bp, Homo sapiens
cagcctgggcaacatggtgaaaccccgtctctacaaaaaatacaaaaattagccaggtgtggtggtgcacacatgtagttccagctactygagaggctgaggtgggaggattgcttgagtccaggaagtggagggtgcagtgagctgattgtgccactgcactccagcctgagtgacag

SEQ ID NO: 2980 - DNA, 179 bp, Homo sapiens
aaatacagagataaatagtaacttaaaattaacttgaatgcaattcttccaccaatgctagctgaagaagcacattttttccataggagraagagagacaggatgaagtcttctagccaatggatgaacttgaactgtttttacatttcctatgattggatatttagtttatttctaat

SEQ ID NO: 2981 - DNA, 179 bp, Homo sapiens
ggctacttggtgaaagtggatggcactgggagagtttggggtgttcacgtccttgccttgcaagtaacatcgaagacttagtagcccacrggaccattgtaccagcctctcctggaacgtgcttcagaaaatcaaaacaaaacaaacaaaattgatgggtataattgttcaagatagag

SEQ ID NO: 2982 - DNA, 179 bp, Homo sapiens
aagccaaaaagaaatttctcctcttcattctgcctcactttttattatactgttcaattatacttttttttaaataaatgtttcggaacwgttttggatttacagaaaaatcatcaagatagtatagagctctcacctgtcctacatgcagtatcctctataattaacgtcttacatga

SEQ ID NO: 2983 - DNA, 179 bp, Homo sapiens
catctttaggctttctgcaaccaagccaccgtcttccacacagcaagagacagttactcagtggaggaataagccttcagttgcataccrctctgtgcattggatgggaggattttgaaacttttggaagctccatactgtggctttattccatgaatccaccagcgctgtgcaccaaa

SEQ ID NO: 2984 - DNA, 179 bp, Homo sapiens
aggtggcaccgacctcccaggacccctgcattgcctcacactttcacttccctccctgctccgcagtgtccataaaataccagccgttcmcctgcctatagcgaacggatccgagggtggaggcaatgacttacctggttgtgggtggatggatgaagaaggcctttacttggagccta

SEQ ID NO: 2985 - DNA, 179 bp, Homo sapiens; identical to SEQ ID NO: 2746

SEQ ID NO: 2986 - DNA, 179 bp, Homo sapiens
gaggcagaggttgcagtgagccgagatcttgccacggcactccagcctgggcaacagagcaagactccatctgaaaaaaaaaaaaaaagkggaagtaaggctgggtgcagtggctgatgcctgtagtcccagcattttgagaggccaaggcaggtggatggcttgagtccaggagttca

SEQ ID NO: 2987 - DNA, 179 bp, Homo sapiens
gtcaagatgcatctcttctaagtggctttttttcaaagcttgagatgcttccaaaatatttataaaaagcagcagggctcttaaaagttrggagacaatcaaagacctccaagaaaaagaagaaagcacggttgctttgcaacctccaacaaagaaggaatgagggagggcaagcaggt

SEQ ID NO: 2988 - DNA, 179 bp, Homo sapiens
gcacatgctggcgattgctagggtaatgagtccagggtgagtttggggcactactttatttatttatttatttatttatttatttatttwtttgagacggagtctcgctctgtcgcccaggtcggactgcggactgcagtggcgcaatctcggctcactgcaagctccgcttcccgggt

SEQ ID NO: 2989 - DNA, 179 bp, Homo sapiens
ccccgcttcagactcccaaagtgctgggattacggctgtgagccaccacgtctggccttgttttttttgtttttgttttgttttgttttktttttgagatggagtttcactcttgttgcccaggctggagtgcaatggcatgatcttggctcaatgcactctctgcctcctgagttcaa

SEQ ID NO: 2990 - DNA, 179 bp, Homo sapiens
cctgtgactctctctcctcagctaagttttttcaaaggcacccagtaggtgttcagagaaatgtgctggattgaactgaactaaccttcyagagggtgttatgaactgcatctccgccctgtccagttggaaactgttgccaacacaaggtcctctttggagaggaaggggagtgggct

SEQ ID NO: 2991 - DNA, 179 bp, Homo sapiens
tacataataacatctacattttataggcagagacagaagcttggctcagcataacagagagggagtgtggagcagtggtcaggatcacarccagtaaatccagatgacctgggttcaagtcccagtcctgccacttcccagctgtgggcttttgcacaagtcacatggtcttcctgtgt

SEQ ID NO: 2992 - DNA, 179 bp, Homo sapiens
cggggcctcagtgccgaggccttggctgagcccacccttgctagaaggggtagctctcaccaggtgtgccctggaggaggccactggccrctcagttactactggggctcgcggctgcacagcttttttggttttacgcagtttgtccgaggtctcctttgatccactgccagctttta

SEQ ID NO: 2993 - DNA, 179 bp, Homo sapiens
attgatagaccgctagcaagactaataaagaaaaaaagagagaagaatcaaatagatgcaataaaaaatgataaaggggatatcaccacygatcccacagaaatacaaactactatcagagaatactacaaacacctctacgcaaataaactagaaaatctagaagaaatggataaatt

SEQ ID NO: 2994 - DNA, 179 bp, Homo sapiens
tgaataaacaaatgtttgttttctcctcttaaaattcccgaaggcaagaggcagtaaatgaataaattaggacatctttggtggacctgmccccagaagcagctgctggccccagcagcctcctgcccccagcagcctcctgcctttgtttttctaaggctctggggctattgtcccca

SEQ ID NO: 2995 - DNA, 179 bp, Homo sapiens
gactgtgccactgcactccagcctgggtgacagagcaagactctgtctcaaaaacaaaaacagaaaagacaaaagtgcatcacagccctkctccttcctctgtttactcttgcttcctttccttccctttcacagttgttggtcctaagagcactcctgtcttcgctcactttctgctg

SEQ ID NO: 2996 - DNA, 179 bp, Homo sapiens
cagaagcaaattcagctggtgcgtggggagcacaatgttccaaacacaattaaaacccaatcagcgtccggaaaagtgcattcatgtccstcaatcaaatgacagagcacatgtggcgtaggcatctctctgggggctgcttcttcaagagtcgtcattgatggcagagatggccccca

SEQ ID NO: 2997 - DNA, 179 bp, Homo sapiens
atattattaggtaatgaaataaggagaccaagaagagagaggaactgaagatgtaaatccagaattaaagcatgaattaaagaatgggcwaaaagaaagaacatgttggtaaagtgcagtggctcatgcctgtaatcccagcacttcaagaggccaaggcaggaggatcacttgagttc

SEQ ID NO: 2998 - DNA, 179 bp, Homo sapiens
tctaattgacagcaatgtgcagctagaatttgatagctgtgttttgctttcaaggtttttcttttttggggttaccttttatatatgaaygtgacaatgaatttatatatacatgtaatatatagttatacaattccttccttcctttcttccttccttccttccttccttccttcctt

SEQ ID NO: 2999 - DNA, 179 bp, Homo sapiens
tttacatttttaaaaaggatggagatatccagtttattaaggttagtaagctgattttttgcagtctagaatgcttggtttttcttatgsgtaacagccagctagtcctccttcacattcctgcaattatagcaggggcatggacaattgaagagtgacgtcaaaaggcttttctggta

SEQ ID NO: 3000 - DNA, 179 bp, Homo sapiens
cacagatgcactgtctggtcccaatcgcccttctcactgccaccaactgcagcatggcagacacaccagagaaaagagaaggtgaaaacrtttctgaatgcagaagcaaattcagctggtgcgtggggagcacaatgttccaaacacaattaaaacccaatcagcgtccggaaaagtgc

SEQ ID NO: 3001 - DNA, 179 bp, Homo sapiens
tcttctgccttatcctcctgagtagctgggattacaggtgcccgccaccatgctcggctattttttgtgtgtttttagtagagacggggktttctccatgttggtcaggctggtctcgaactcctgacctcaggtgatctccccgcttcagactcccaaagtgctgggattacggctgt

SEQ ID NO: 3002 - DNA, 179 bp, Homo sapiens
tcattggacaccagtttgcttttctttaaagcctgtttcttttgaactgggctgccgcagtctataaaattttaacgcatggatttcccrttgttcgggtgtctgtggggcaccagccttcctgtttcactgtggtgtgccgaccaggaaagaagctggctggctgggaggtctggggg

SEQ ID NO: 3003 - DNA, 179 bp, Homo sapiens
aggcagagtgaacagatgagaccaattcagcacccatcaaggactcaggcagaaagcaagctgatggcattccctacttgggatggcccrtgaaggatttgtgacttcagtggagaaacttttaagagaccataagccgagttgagtgatcaggaattttatccgattgaaatgaaagt

SEQ ID NO: 3004 - DNA, 179 bp, Homo sapiens
tacgtcctgacatactgctaactgagaggttatataacagtatatactgtataactctattttaataaaaacatatatttatgcataaarttattggaaagctaaaccacaacatgttaatgatgttatgtctaggcagagggattagaaatatatatatgttttatttcttttggctt

SEQ ID NO: 3005 - DNA, 179 bp, Homo sapiens
ttgagaccagagaacttactataagctgggtaccctgggaggcactgacatatatcatctcacaatctttgcaaacaactctagggaacrggacacccctgttacagatgaggaggctgaggatcagagatgagcttgctcaaggtcgcttagctagtaagtggtagaattgggcttct

SEQ ID NO: 3006 - DNA, 179 bp, Homo sapiens
ttatttatgagtgcctgaaattggaaagggcctaattatcaataataataagctggttaaattactatttaattctgggccttccatacrttggactcttacgtaacaattaaaaagatgatgtagctctacatttattttcaaggaaatacgtcctgacatactgctaactgagaggt

SEQ ID NO: 3007 - DNA, 179 bp, Homo sapiens
aaaacagactgcagcttccacattgccctctcttttggatcacttctctggaggaagccagctgtcatgtcatgaagacattcaagcagycctgtggagaaatccatgtgacaaagaactgaggcctcctgccaacagccatgtgagtgcaccgtcttggaagaggatcctccagccat

SEQ ID NO: 3008 - DNA, 179 bp, Homo sapiens
atgtgagtgcaccgtcttggaagaggatcctccagccatcatcaagcctccagttgagaccacaggcccaactgatatatagactgcaayctcatgagagaccctgaagtacaaccacacagcaaagccattcccagatttcagaccccccagaaactatgtgagataatcaatgttta

SEQ ID NO: 3009 - DNA, 179 bp, Homo sapiens
gttgaagtctatggtcccactcatgtatggcctttgacttaaggatatgagtggaaagaggacaacaggatcaataagatgggctgaggrcccactgaatagatacaccccaatacaacttttgcctctgtataagcaggataatgaccataggtgccttaggtagccaaagaacctgg

SEQ ID NO: 3010 - DNA, 179 bp, Homo sapiens
tactagctaatccctattaacctagtaccttgcacactgtatgtcatttcatctccttagcaatcttcagcaagataagactatctccaycttactgaggaagaaaccgagactcagagaggtgaagtggcttacccacaatgattcaaaggctagttctctacttccaaagcctacat

SEQ ID NO: 3011 - DNA, 179 bp, Homo sapiens
ctcctgcagttttcagcttgatgaagatgttatgaaagatgtgaccatgagagctgcctgcctgtggcagtcagaatttttgattgtcarttatatatttttgtctctataaagctaattgtccttagtaatattaatggggaagagaaatcagtttttaaggaagactgcttgctaga

SEQ ID NO: 3012 - DNA, 179 bp, Homo sapiens
aatacaggcacaatttctccaaatctccaacctatcctagcttccacctatactacctcttgccaaataaggagccagtatttctttttscattggcatatacccccaccagtttacctgggagattaattccattttgcaggtacaaaaaagattgcctttgtcatgtcagtcatcac

SEQ ID NO: 3013 - DNA, 179 bp, Homo sapiens
aggccacaccatgggttccgaaacaaggtcactcagtaaaaaaggtctattggttatatgtgtgtgtgtgtgtgtgtgtgtgtgtgtgtrtgtatacacagttatatgcatgtgtgtattttatatatatatatatttttttttctttttccttttttttctgcagggaaaatcccaac

SEQ ID NO: 3014 - DNA, 179 bp, Homo sapiens
ttactctcttaggtttatatattggtgaacatctttaattttgttatgtgttactaccaaaatacctgtaggaatgttaacagtctgaaycaaatgatattctcaaactcatgtaatgttttgcaaaaaaaaaaaaaagaaagaaaaaagagcaaagatgcaaagaatgttttgtggtc

SEQ ID NO: 3015 - DNA, 179 bp, Homo sapiens
cctccagttctttccatcccttgggcaacctacatatctgtggcctattctaggggactggaagtgacagctgagacctgcttagtgacrtgacatcatgggaatttgagagcacaggctttgaggctggcatggtgatagtaattactggcctcagcatgacggggagggtgactgag

SEQ ID NO: 3016 - DNA, 179 bp, Homo sapiens
attcgggtccttgtggacaacctaacttaatatgtagacaagactgaaaacctaacttaggagtatgcacctgtaacaacagctgagtcytggccaatcccagcagccatacgtcaaccactcatacactgctgtgttcaaactgtgttcaaataaagcaaatgctgagctgtaaccaa

SEQ ID NO: 3017 - DNA, 179 bp, Homo sapiens
tgtaaccccagcactttgggaggctgaggcaggtggatcacttgagctcaggagttcaagaccagcctggccaacatggcaaaaccccayctctacaaaatatgcaaaaattagctgggcatggtggtgcatgcctgtggttccagctacttgagaggctgaggtgggaggatcacttg

SEQ ID NO: 3018 - DNA, 179 bp, Homo sapiens
gacctactcccctcctaaatcccatccattgatccctggggcccacaggataggagctttcatttaagaatgtatctctctctctctctytctttccttctctctttctttctttccttctctctttctttctttcttttctttcctttccttccttctctttctttctttctttcttt

SEQ ID NO: 3019 - DNA, 179 bp, Homo sapiens
tcatgacatcaagagatcgagaccatcctggccaacatggtgaaaccctgtctctactaaaaatacaaaaattagccgggcgtggtggcwcgtgcctgtagtcccagctacttgggaggctgaggcaggagaatcacttgaacccaggaggcggaggttgctgtgagccgagatcatac

SEQ ID NO: 3020 - DNA, 179 bp, Homo sapiens
tttgcaaaaaaaaaaaaaagaaagaaaaaagagcaaagatgcaaagaatgttttgtggtcaaatgagttggagaaattctgcatcgtctmgtctttatccttcctggaaactcacaaaccatattagcatattaaaggctctgaggagtcctgcagaaaaagatcctgttaccctttgt

SEQ ID NO: 3021 - DNA, 179 bp, Homo sapiens
acaaacatggaataagtcacagctgcattcaagaaacttatattctaatgggggagactaagatggaaagtaataaatgtaaacataggmgtttgcaggggataaagagagggcacaaagaaaagagtgattccacatggtgatggtacatgatggttctgcactgaggggtaggggga

SEQ ID NO: 3022 - DNA, 179 bp, Homo sapiens
agcaaccttggataaatagggataatagtggtgtttatatcatgaaattttaataaggattaaattagcgaacttaagaacttaaaagartacttgtgctgttttaaagtctcctcattgttattattagaattttatgtacaattttatgtatctgtacatgtgcatttttttcctga

SEQ ID NO: 3023 - DNA, 179 bp, Homo sapiens
gttgactctaggcaccatgttgtacagcagatttctggaacttattcatgttgcataactgaaattttacacccgttgaatagcaattcycccttttcccctgctccctgtcactggcatccagcattctactctcatgaggcaccaagccagtcatgagggatccacccccaaggacc

SEQ ID NO: 3024 - DNA, 179 bp, Homo sapiens
ttgaatattccttgttctgagatggggttggaggttttgacttgccattcagccttgttgctttagctggctggaaacaattgctgcgcraagtaatatgtgatgggagagcatcaattcttggcacctgtttgggtgctggagtaataaggctacggctgctgctgctaacaaaaaac

SEQ ID NO: 3025 - DNA, 179 bp, Homo sapiens
atgtggtagcatcaggccagttgacaggacaggtgcttcagaagagaatgatttgtgtatcaaaggattaagagaggcccttaggaaaaytgatgaagccctccagtatttctgaaaaaataccctctttatgatcctgctgcaaaaagtccaatgtgaagggaacatgtcatcttatg

SEQ ID NO: 3026 - DNA, 179 bp, Homo sapiens
tataggaaagcccacattgttatgatataaaaataatcaccagaaactcatgcacgtattccccagcaaatctctcagcccgttttacakgagtgtaactactcactagtgcatcaatacctttgttggacactccctcacaggttgccagatgctataggtatccgactataccatgc

SEQ ID NO: 3027 - DNA, 179 bp, Homo sapiens
ttagtggaaagtcaactcattgaatgtggagggctctgggaaggctcaggtagaaagaggtattgacatgagtgctgaaagatggttagkgggagagaggggagcaaggagagaaaagagagcaagtgatccaggtgaggatgacagtaaatactgaggctgagtcagcaaaatgcaaa

SEQ ID NO: 3028 - DNA, 179 bp, Homo sapiens
aggctgccacgtacagacaggcaggttggtccctgcaacaaaggtactaggccaaggagatgtctagtgagggggagcggtctgtctacyaagccattgccccaggcccagggttgtgcccacctggaagatgggaagcctttctctaatatgtacaaagatgccctatgggcgaatga

SEQ ID NO: 3029 - DNA, 179 bp, Homo sapiens
tctcaaactcctgggctcaaacaatctgcctacctcagcctcccaaagtgctgggattataggcatgaaccactgcgcccagccaaaaaycctattttaagtaagaaaagtaaattaaaggtagtcctgtatgtatgttttgttgttgttgttgtgttgttgttttggttgttgttttg

SEQ ID NO: 3030 - DNA, 179 bp, Homo sapiens
tgtgtgtgtctgtgtgtgtgtgtgtatgtgtgtgtgtgtgtatatatatatatatatatataattacatgctcaaatatttctttataayagggtgcatgatcaacaaagtataaatatccatcaataatagaataggttgggtgctgtggttcatacctgtgataccagcactttggg

SEQ ID NO: 3031 - DNA, 179 bp, Homo sapiens
caactgggggcaattgatcagaagaacagagaactataattttcctagcattaagtgtttaaagggaggcgagaaagagattaggcaccrgcacctgcgttcaatttcccttctacctgtgctttctgtgtaatctgagaaaagtcactcaacagctctgggcttcagtttgatctaca

SEQ ID NO: 3032 - DNA, 179 bp, Homo sapiens
ggcgttgcccgctgaggctgattgtgcacacaccctataagccagaaatctgaggcctaggcgtgtgcctgaaagacactcttttgtgtrtgttctgggagacacacagggcaatgctcatagtagcatcatttgtaaagcaatgactgggaatcaatccaaaggtctatcatcagccg

SEQ ID NO: 3033 - DNA, 179 bp, Homo sapiens
tcagctcaccgcaagctccgcctcctgggttcagccattctcctgcctcagcctccctagtagcagggactacaggcgcccgccaccatscccagctaattttttgtatttttagtagaggcggggtttcaccctgttagccaagatggtctcgatctcctgacctcgtgatccgcccg

SEQ ID NO: 3034 - DNA, 179 bp, Homo sapiens
ggcaggaagataaatctaaccctgtaattccattttggtcaggagaagcctatacttgtctcaagtgttttgaaaaatccttcatggggrtagctgttggtcattaagaatttctagtctgaccagtggtcactatcactgcagtattactgttatgtacttgctgaaagaatggtggg

SEQ ID NO: 3035 - DNA, 179 bp, Homo sapiens
atgcttcaacaggggaagactcctaaagacataatgtgaagacaaaatgcaactcacagagggatgcataagcccgtttccatatatatraactgcagaaaagcaaaataagggccatatattgttaggaaacagagatgtgtagtaaaatgagaaagaaaagtaagagaatgattgtt

SEQ ID NO: 3036 - DNA, 179 bp, Homo sapiens
gtctcctgggcggatggggtgggcagctctaaatttatttgacctaattcatttagttttttccctttcgctttccaggggaggggtttktcaggacttctccttttcacttgaggagaattcacctacctcctttactttcttctggggtgtctgggatgagaacaatggaatcttga

SEQ ID NO: 3037 - DNA, 179 bp, Homo sapiens
gaggagaatggcgtgaacccaggaggtggagcttgcagtgagccaagatcgcaccactgcactccagcctgggtaacagagtgagactcygtctcaaaaaaaaaaaaaaaaaagaacgcctctaaaagatgggagagacggaaaaaatggaatgcaagctagcatttgcagcataattc

SEQ ID NO: 3038 - DNA, 179 bp, Homo sapiens
ataggaagaaagttgaggaactggagtcagaccctggactgcctgcctccaaaatctacactttaaaccaccatattagactgctgcacygacagagagttgtttataaaatcctaagttgcaggtggtgtcatggccacccagataaaaactatatttcccattgtcccttgcaggta

SEQ ID NO: 3039 - DNA, 179 bp, Homo sapiens
aaagataaccgagttcatgtagaagagttaagggacataaatgtgtagaaataaaatcagacaacctaaggtgagaaaaatatctgaaasagcatcaaactcaaatctctgttctatgcagatatcatttctgactcttctacgtctttagcattctgaagtaggggtcattctgattc

SEQ ID NO: 3040 - DNA, 179 bp, Homo sapiens
ttccgtccagtgccaccagcaggtccaacagggtgcaactaaagtgtaagttggagttccagaaagcactgagtgtctcaaggaatcagwtcattgagatcataggccttccccaggtgagtgcaggaatgacaagtttgggtctgcttagcagcccattccagtggtggtgagatgac

SEQ ID NO: 3041 - DNA, 179 bp, Homo sapiens; identical to SEQ ID NO: 2805

SEQ ID NO: 3042 - DNA, 179 bp, Homo sapiens
ggtggggaggaagaagaatgcaagggaggaggggccctgagggacatctgagatatttcagatgctgttgcattggtgtccattttatcrttgctccttaaattgctcgtttatacttgctatactcttgagaaaggatgctctatttcaaaataagactctaaccaattcccaaagct

SEQ ID NO: 3043 - DNA, 179 bp, Homo sapiens
gccatgttggccaggctggtcttgaatacctgacctcaagtgatccaaccgcctgtcctgatttctcacagaataggttaggtttgcctkgttttgaatgtcatatgaatggaatcatgtagtgtgtgctcatttgttctgcatgtctgtgagattcatctgtattactgtgtgtagct

SEQ ID NO: 3044 - DNA, 179 bp, Homo sapiens
ctcctagccgacctgccactcatccatctgcccagtctccatctgtccacttgctggaactccagccatccatcctagcctacctacagytaaataatgaccaaaaacaaatagtcagttgttagcatggtgttttgcttgtgtacatatggtgttttgcttgcatacaagggaggttg

SEQ ID NO: 3045 - DNA, 179 bp, Homo sapiens
tctgtaagtgctttacagtgtagaaaatatattactacagtggtgtatataccatgtgtgtgtgtgtctgtgtgtgtgtgtgtatgtgtrtgtgtgtgtatatatatatatatatatataattacatgctcaaatatttctttataatagggtgcatgatcaacaaagtataaatatcc

SEQ ID NO: 3046 - DNA, 179 bp, Homo sapiens
gggtcttgctctgttgcccaggctggagtacagtggcacagtcatggctcactgtagccttgacttcccaggctcagattatcctcctgyctcagcctcccaagtatctggaactacaaatgtgtaccaccacactcagctaatttgtttatttttttatttttaagagatggagtctc

SEQ ID NO: 3047 - DNA, 179 bp, Homo sapiens
cagagggccgcatgaagtctgggtgaaactgccacggcattctcttgcccagtggaatcagaagggttattgctgttttgttccctgctrtgtcctcagtgcttaaaaaggaacataataggtgctcaaaaaaaaaacattcatggattgactaactgaacacacatatagattggggt

SEQ ID NO: 3048 - DNA, 179 bp, Homo sapiens
ctgcatagcagaatcaagaggacatgacagaactgttcaggcgaggaggggcaggagcgaggcccagcatggggagggggctttggcctytggaggcccctcctgggctgtgttgctcttgactatggtaaacatggaagtggagagaaggcttccttgattgtgctggatggaaagtt

SEQ ID NO: 3049 - DNA, 179 bp, Homo sapiens
aggtgcacagtgcagcatgacagagcagtggaaatgggtgaatctgagatgcctggaggcgagggggaaagagcacatcacagaggacarcgtccagtgggacacccttttataaaactcacactgctccttctgacacccagtcgcagttgtgggtggccctctgggaccttagtgtc

SEQ ID NO: 3050 - DNA, 179 bp, Homo sapiens
ttccgggaaggcccctggggtaggtgggtgtgggtgtgtctgggggatgagcaggtgggtgggcacacacgtggggagtggtcctaggargtttgggccttggaaaccctcccaacacacggagtcactgcagggatattccaagagttcattttggttttgtttttttctttttgagt

SEQ ID NO: 3051 - DNA, 179 bp, Homo sapiens
acctgttgtgtgctaggtgctattctaagagtgttgcatgtattaactcatttaatcttcctaccatttctctgtggtatgcacttattrccaaccctattttatcaatgagaaactgaggaacagggaggctaagaaacttgtccagagtcacaaagctaataaatggtacagctgga

SEQ ID NO: 3052 - DNA, 179 bp, Homo sapiens
atgggtgaatctgagatgcctggaggcgagggggaaagagcacatcacagaggacaacgtccagtgggacacccttttataaaactcacrctgctccttctgacacccagtcgcagttgtgggtggccctctgggaccttagtgtctggggaagtggtcagatgctgggccagggctgt

SEQ ID NO: 3053 - DNA, 179 bp, Homo sapiens
aagtgaggcttcctgaaggctaatcttataactagcatgctgtcacttccacccatatcccattggccaaagcaggtcacgtgacacaaycaagcccaaatgaaggagcagggaaggatacttggccattggtggaggactgtagtctcgtggcaaagggcatggacatgggggtgggg

SEQ ID NO: 3054 - DNA, 179 bp, Homo sapiens
cccgggaccggcctcttgccgggtgggaacgcccgtttctctgggggtcagctactcccgaggctgcagcaccgccctgcgggccaagtmccctgtttgggagctggctactgcggcatccctcacctcatggggccagtcccttgccttcagccagtggtgacagtacttctgtcccc

SEQ ID NO: 3055 - DNA, 179 bp, Homo sapiens
aggagtgggagccagcctgcctggaagtgaatcctgcccctgccaactctgtgacctttcacatgtatccgctagtattgggcagcagtrctgtgtgataaaccagccccaatccagcagcttaaaccaacaacattgattctcatggatccgtggggctgctggggcagctctacttc

SEQ ID NO: 3056 - DNA, 179 bp, Homo sapiens
aggccgaggcaggaggattgcttgagcccaggagtttgagaccagcctgggcaacatggtgagaccctatctctgcaaaaaatataaaaractagctgggcacggtggtgcgtgcctgtagttccagctactcagaagctgagacgggaggactgcttgagtccaggtgaggctacact

SEQ ID NO: 3057 - DNA, 179 bp, Homo sapiens
gttactactggggctcgcggctgcacagcttttttggttttacgcagtttgtccgaggtctcctttgatccactgccagcttttatcacraggggatctgcatattgggccctgttataatcttcctcccatcatcacactcgccgggtctcctcaaactcctaccccctcagattctt

SEQ ID NO: 3058 - DNA, 179 bp, Homo sapiens
aaattgctgacctgctgaattatgagctcagtatttggctgtatacagatacagtggctggacctttgagccattatttatgacatttgyacaggccctctgtcctgtattcagtagtcaatggataccattattctcgtcaccacggtagggttcaaatggctgggagctttaggacc

SEQ ID NO: 3059 - DNA, 179 bp, Homo sapiens
gctaatttttgtattattagtagagatggggtttcaccatgttggccaggctggtctcaaactcctgacttcaggtgatctgcccatctyggactttctggcttgttttcggcaccctctctcatcccctcctcttacgctcacatgcccctttccctttgagtttgccagcccttgag

SEQ ID NO: 3060 - DNA, 179 bp, Homo sapiens
agcccccagccaacccctgcagctaacagcaaatgaatgtgagcccgtttctgcaaccagaaaaccacctggctgagcccagtacaaatwgctgacctgctgaattatgagctcagtatttggctgtatacagatacagtggctggacctttgagccattatttatgacatttgtacag

SEQ ID NO: 3061 - DNA, 179 bp, Homo sapiens
atcacaggagatgaatctataccatcaagaatgagaaaggaggacaggcgctgtagctcatgcctgtaatcccaatgttttgggagaccraggcaggaggatggcgaggggccaggatttcgagaccagcttgggcaatgtggtgaaaccctgtctctgcaaaaaaaaagtaaaaaatt

SEQ ID NO: 3062 - DNA, 179 bp, Homo sapiens
gcttggattacaggtgtgagccaccgcacctggcttgacacagcattttttttttttttttttgagacagagtcttgttctgttgcctargctggagtgcagtggcacaatctcagctcactgtgacctctgcctcctgggttcaagtgattctcctgcctcagcctcccaagtagctg

SEQ ID NO: 3063 - DNA, 179 bp, Homo sapiens
gaaagttcttccaggctcagcccctctgctgtgtgaccttgggcaaatcccttcacctctctgagcatgttccctcatatcaaggtaggrccaaaagggtcatggaaattcactggggtcacagaaagcactgtttatttatttttatttgtattttattttttgagacacagtttcac

SEQ ID NO: 3064 - DNA, 179 bp, Homo sapiens
tgcctcagccttccgactagctgggattacagatgtgcacaaccatgcccacctaatttttgtatttttagtagaggtgggatttcgccytgttggccaggctggtctcaaactcctgacctcaagtgatccgcccacctcggcctcccaaagtgctgggattacaggtgtgagccact

SEQ ID NO: 3065 - DNA, 179 bp, Homo sapiens
ttaaatactcatggagccagggacaagatactgttctgggtgcttcatgtctgttgtctctcttaatccttacaacagtctggtgatcamgaaactcttgtaattccaatgtcagatgaggaaactgaagttcagagaggaggagtgggtaacacagccatagagcaaataatgggtag

SEQ ID NO: 3066 - DNA, 179 bp, Homo sapiens
ctcatcatatagattgcaagctggcaacgtgtcactctcactccttgcttgtataatttgtagagtgggggtggaaaaagtagttcccaytgtcagtggtgagggaataataatattattattaattaaatactcatggagccagggacaagatactgttctgggtgcttcatgtctgt

SEQ ID NO: 3067 - DNA, 179 bp, Homo sapiens
tgtgtttccaactctgaatgacaaattctttctattcgttccccatttctgaaggtactgccccaggtcctattcaagacaaaaggtttkccctgagtcccaggcttaagagagcaaagcacaaattgaagaaggtcaggaattttgagcaggatgttcagaaatgtcacatttttcca

SEQ ID NO: 3068 - DNA, 179 bp, Homo sapiens
tcagcctgggtgacagcaagatgctgtctcaaaaaaaaaaaaaaaaagaaaaaagccctggtgcagtggccttaagctactgtaaagtakcttaacaaagtgcctgtaatcccagcactttgggaggctgaggtgggcggatctcttgaggccaggagttctagaccagactggccaac

SEQ ID NO: 3069 - DNA, 179 bp, Homo sapiens
aagaacctttggggttcagaggagttcagaaaacacagtcaaccagccacagagcctgtgtttccaactctgaatgacaaattctttctrttcgttccccatttctgaaggtactgccccaggtcctattcaagacaaaaggtttgccctgagtcccaggcttaagagagcaaagcaca

SEQ ID NO: 3070 - DNA, 179 bp, Homo sapiens
gagacacggttcagtctctcaaggggctcacggcctgctggggacactgaggcaaggccacaagtggctcttatgtcaggaatcccaggyccatgtgccaggcactttgcccacaaagtctcactgagcctccaccctaaacccctgagggaagcatgtgcacctcccctggatggatg

SEQ ID NO: 3071 - DNA, 179 bp, Homo sapiens
gcaaagcactcaggcgcagctctttggggctggaagcctagctgttgatgaataatgattcagcacagagttaacatgttttagagatayaaaaatagagactaccacgagcacactatgtttccctaagcttttcattcattagttcaacacaaagctactgaggatttaacacatat

SEQ ID NO: 3072 - DNA, 179 bp, Homo sapiens
ctgagtccccagtcattgcagagcatggataaaccaccttacacttccatggccaaatttctggcctacaaaaacaaccatgaaaaaatrtttgttttacttgactaagcttgagggatggttcttttaatgtagcaataaataaaagaaaccatttaaaagaaaaagttaggagacca

SEQ ID NO: 3073 - DNA, 179 bp, Homo sapiens
gaaatggccaggccctagtactccaatcaggctaggacattggctggaagctctcttggctggaatgctgcagtagctcctaaaggtacrgttgttggaggttgcagtgggagccattgcacccagcagaaaggtaaattctttcttgcagggagctccaagtggtacactcccatggc

SEQ ID NO: 3074 - DNA, 179 bp, Homo sapiens
ctctccttaagactggtttttattccttcctggtttttatgtaacaaaggtgaatataggctgagtttacttagtcccatacgtagcttyacctgggaaagtggggcacagtgaagggggctgaggtgggagcatgagtgtgataaataggacaggcagtgtgtttgggtgactttgac

SEQ ID NO: 3075 - DNA, 179 bp, Homo sapiens
acaaaaaaaggaaaaaaaattaaatgtatgtattctgtaccttgttacttggtgactctaaggatgcggccacatgccaaccattctggktaaacaagatcccaggtgggcacttggagtctctccttaagactggtttttattccttcctggtttttatgtaacaaaggtgaatatag

SEQ ID NO: 3076 - DNA, 179 bp, Homo sapiens
attcctctctccttggatctggctttgcctctgtgtatcaatttgggtcctctgagaagcagctgttgagactgagttaggagtgcaagmggtttattaggcatagcaaagcactcctgaaagatcaaggaaagggaaacagaaatgaaaaggaacagccttacaccacagtgcagatt

SEQ ID NO: 3077 - DNA, 179 bp, Homo sapiens
ctcacacttggccagaggacatgagttggctggatgttaacaagatgaacaggcagacagacagacagttgcaacaagcatacatcattyatctagaatgcgagaagctgggtgcagtggctcttgcctgtaaccccagcactttgggaggctgaggcaggtggatcacttgagctcag

SEQ ID NO: 3078 - DNA, 179 bp, Homo sapiens
cctagtagctgggattacaggtgtgagccactatacccagctaattttttttttttttttgtaattttaatagagatggggtttcaccaygttggccaggctggtcttgaactcctgacgtcaggtgatctgcccacctcagcctcccaaagtgctgggattacaggtgtgagctattg

SEQ ID NO: 3079 - DNA, 179 bp, Homo sapiens
aggagctgacactcagggaaattcacctgcccaagccactcccctgggaaagcacagagccagagttgaagttttcgtctgtctgactcytgtaagcaaattaaatatggcctgagaaggactccatacttctatattcgggtccttgtggacaacctaacttaatatgtagacaagac

SEQ ID NO: 3080 - DNA, 179 bp, Homo sapiens
tggctcacgcctataatcccagcactttgggaggctgaggcaggtggatcacaaggccaggagtttgagactagcctggccaacacggtraaaccctgtttctactaaaaatacaaaaattagccggctgtggtggtgcatgcctatgatcacagctactcaggaggctaaggcaggag

SEQ ID NO: 3081 - DNA, 179 bp, Homo sapiens
ggaaagtggggcacagtgaagggggctgaggtgggagcatgagtgtgataaataggacaggcagtgtgtttgggtgactttgaccacctragggtctagtcgacctttcagtacatgtttgggcccctgcatcatgtcaggggggatcccactgctttattcttctaatacagtcagaa

SEQ ID NO: 3082 - DNA, 179 bp, Homo sapiens
attgggtcactcccatcagagtccctctctgccaggtactttggaagtagtggttagaaacatagacactggtcgggtgcagtggctcaygcctataatcccagcactttgggaggctgaggcaggtggatcacaaggccaggagtttgagactagcctggccaacacggtgaaaccct

SEQ ID NO: 3083 - DNA, 179 bp, Homo sapiens
taatttcacaatggattataattgggtcactcccatcagagtccctctctgccaggtactttggaagtagtggttagaaacatagacacyggtcgggtgcagtggctcacgcctataatcccagcactttgggaggctgaggcaggtggatcacaaggccaggagtttgagactagcct

SEQ ID NO: 3084 - DNA, 179 bp, Homo sapiens
tacaattacactattagtgtgcatgttcaagtactataacctaaataaatatattaaggattctgggagaaaggacagaggacaggagcwacaggtctagctacaggaaacatggaaaggtcccaggggaagcaatgtttaacctgagttctaaggataactgaaattcaccacttata

SEQ ID NO: 3085 - DNA, 179 bp, Homo sapiens
gtgcattcaaaaatggccatgtcaaacttctccactagactgtgagcttcttgaggatagagtcatgtctgtctgacttagcaaaacccmtagccctagtctaatcatgagaaaaacatcaaacaaaccccagttgagggacatcctacaaaatatctgaccagtactcctcaaagctg

SEQ ID NO: 3086 - DNA, 179 bp, Homo sapiens
tccttccttccttttctttctttcttcctttccctccctccctcccttctttcttttttctttctttccttccttccttccttctttttstttctttcttttttttttcaggtcatgctcagttgcccccaggctggagtgcagtgatgcaattacagctccctgcagcctcgaactcc

SEQ ID NO: 3087 - DNA, 179 bp, Homo sapiens
tgagtatggtatatttgtcacagtgaatgaaccaatattgatgcattatgattaactaacacccatactttattattcagacgtccttartgtgtcctcgtgtcctttttctgttctaggatctcatccaggataccacactacatttagttgtcccatctccttaggctcctcttggc

SEQ ID NO: 3088 - DNA, 179 bp, Homo sapiens
gactctcttttcagactcagcccacctgcacccaggtgaaataaacagctttgttgctcaaaaaaaaaaaaaaaaaaaaaaaaaaaagaraaatatctgatactgggtaatcgataaggaaagggtttaattggctcacagttctacaggctgtacaggaaacgtaatagcttcggctt

SEQ ID NO: 3089 - DNA, 179 bp, Homo sapiens
ctcaagtgatcctcccctctgcctcccaaagcactgggataatagacatgagccaccttataaggcctaaatttcccattgttgactcamccagggctatatgatttgaggggtgccaagaaactcaaaggcacttctctccctggccttaagtacccaccacttgtaaaaattttggt

SEQ ID NO: 3090 - DNA, 179 bp, Homo sapiens
gggtgaagaagagggcatggtttccatctctctcctgagactgtcctgatctttcctggaaccttggctgtttcactggggatgaccatycaagagctctgaatctgcaagccaatggccatgagttcagatgctgattgtgtctccatgtgacattgcacaagttgagtcacctcttc

SEQ ID NO: 3091 - DNA, 179 bp, Homo sapiens
tttcgcggattggttgggtcccccattaagggatggaaaaatgcttgctttgcgattacaaatggccaacattcaggcgggcaactcccrtccccgctcacctcgggaaattgctgctaatgcggttctggagaaggtggctgtctcctttcttccaggtcagatcctagcttctctgc

SEQ ID NO: 3092 - DNA, 179 bp, Homo sapiens
ttgagagcagaagggaggaaggaaacaagagaatgcaccttattaatattgaatttagataatagaaaaaaagataatacagaagtaggracatgttcctatatctccttctgtttccctagagtaactaccattaacaatttgttctttatccacccaggcccttttctctacatcta

SEQ ID NO: 3093 - DNA, 179 bp, Homo sapiens
gaagaggagttttacttgtgggtatttgagccatgtaagccctttttaacccacaaaatatactaggacccttattctacagaaactctyacatgtctatgcaaaggtaaaagcatattcattttaatattttttgttgaaagaatgaaaatgtaggaaaaaaatatatcttcgtcaat

SEQ ID NO: 3094 - DNA, 179 bp, Homo sapiens
actgcatcattacactcccttgctctctagtttctggctgggtttggctaatgaggcaccccagctcctcttccccctccggcctacagyggtaacagctccctcatgttgctacactgccccttgttggtttctttaaaccctgctcacacctttacaaatagaccctttgtttaact

SEQ ID NO: 3095 - DNA, 179 bp, Homo sapiens
gtaaaagcatattcattttaatattttttgttgaaagaatgaaaatgtaggaaaaaaatatatcttcgtcaatagcaaatagcctgactraactctgctccatccatactctggactagtaggcagtcattaaagaaatgaggtcatcctgcgtgttccaatctgagaagatgttcaga

SEQ ID NO: 3096 - DNA, 179 bp, Homo sapiens
aaagcatattcattttaatattttttgttgaaagaatgaaaatgtaggaaaaaaatatatcttcgtcaatagcaaatagcctgactaaamtctgctccatccatactctggactagtaggcagtcattaaagaaatgaggtcatcctgcgtgttccaatctgagaagatgttcagatta

SEQ ID NO: 3097 - DNA, 179 bp, Homo sapiens
cgggaagaaacaggggccaaggaacccatcatttatgtgtctgacagccatgggagcagcccgactggagacagagggaatcctcgaacrggaccggggtagaggagaaaagccggtcatggtgaggcataaagggcagcagagaccctaccctcatatatcacagggaggcccggtca

SEQ ID NO: 3098 - DNA, 179 bp, Homo sapiens
aaaagaaaaggaaattggaatggcgttttgagttttggtgtattttttgtgttttgtttgtttgttctttgttttgtgtgtgtgtgtgtkttttttttaggcgggatctcactctgtcaccaggctggagtgcagtggcgcgatctcagattactgcaacctccagctcccagattcaa

SEQ ID NO: 3099 - DNA, 179 bp, Homo sapiens
gtctctaaataataataggagtaaaaaaaataaatcctaaaaaattatcatgtgcacttacgcacatgataaaaaatatcagacagaaaragtatgcagtgacctacgccctctactcccttcatttcccctccccccaaccactaatatcaaagtttgtcttttgtgtatctgtttat

SEQ ID NO: 3100 - DNA, 179 bp, Homo sapiens
tagcattccaggtatcccagcccaggcaccaaagagatggttaagaggtgggtggattacctgaggtcagtagttcaagaccagcttgaycaacatgtaggtttcagttgagcctagcattccaggtatgccagcccaggcaccaaagagatggttaagaggtgggtggattacctgag

SEQ ID NO: 3101 - DNA, 179 bp, Homo sapiens
ggcaacaacagggataagaggtcttagacaagtttgtacgataaggggcctgaaccttatcagctcatggttcaccttccagttatctgytgccatgtaacaaatggtcccaaaattaatggtgtaaaacaacaattattttattaagctcgcagattccatgggtcaggaagtcagac

SEQ ID NO: 3102 - DNA, 179 bp, Homo sapiens
ccattatgctaaattcttcccatacattatctctttaaactttatattgatcccatgaggtagcagtagctactcttcttataaccaatytgtagattagcaatccaaggtttagataggttaagtttaacatattgccagggagtggtggagctggatttggagacaggcaatctgac

SEQ ID NO: 3103 - DNA, 179 bp, Homo sapiens
aatctaatgcccagtgtatgtcaaagcccaggctgtgtaatggtgaataagacacagttgctgactacaaagaatttactattaatggasagaaatgagtcagtaagtaatggcaatgcagtgtggtgttgtgacagggggatgttcaggggaccagaagagtgtagagcacacatctt

SEQ ID NO: 3104 - DNA, 179 bp, Homo sapiens
ttgccgggtgggaacgcccgtttctctgggggtcagctactcccgaggctgcagcaccgccctgcgggccaagtaccctgtttgggagckggctactgcggcatccctcacctcatggggccagtcccttgccttcagccagtggtgacagtacttctgtccccaagaagccagttccc

SEQ ID NO: 3105 - DNA, 179 bp, Homo sapiens
atctccaaggaccactgtactattggaaacctcatgtgatctatggacatcctgtgtgtcagtttcctcttgcctgctgcaggagctaaktgttacttgagatctgacctgtgtcaaagttacatgactagtcagaggttcagccccagcagcatcaagttctacagcttgttcatgtc

SEQ ID NO: 3106 - DNA, 179 bp, Homo sapiens
ggggcatgatatggtcttgaattttatggtgacatagatgccaagagcctcgggagtttcactagtccaatgtgcccatttcacaggggyaaaaacagaggacccaaggaaagaaaagaacccacctgaagctcctacagcccaacatgtagaaggttctgggtgtgcatatatatata

SEQ ID NO: 3107 - DNA, 179 bp, Homo sapiens
agcccctggaacatgtcttggcattaggagtaaactcaggcagctcggtttattagctgtttccatgggagagaactcttggggccaaawagatatttacaaatattgtaagcactcagctgctccccaggagtgacattgctgtctggagataaatagcttctcagagaagttaggct

SEQ ID NO: 3108 - DNA, 179 bp, Homo sapiens
aaagtggaggagaggaggatcaggtcctgtgaataacttttccaaaactgaggcctttccagctgttgttaggactatgatcaaaaagarattggaaaactcagtgtgaaatattttatagcaacataaatgatttgactatgaaattacagggaaagtaggtaggtaagatatagact

SEQ ID NO: 3109 - DNA, 179 bp, Homo sapiens
tatgggaaggaatagatatgacaatacagatgctggtaattgctgaagctggcagaaggtacagggagaggaatacactacactattctrtttactttgtttatgtttgaaattttttataataaaaattaaagatcttaaggctggtcttctaatgacctcatttctattatcttgaa

SEQ ID NO: 3110 - DNA, 179 bp, Homo sapiens
actaataaactataaaaaaagttacctctcaggggaaggaatccaggcttaaggccattccaaagtatccaagttgattacacagaaatrcctccaataggtcctctaaaatatttactagtgatagtagaccacctcactcactgggttgaagctatccccttttcaaatgcaacaac

SEQ ID NO: 3111 - DNA, 179 bp, Homo sapiens
ctgttaggaaacagagctgggagaagaagataatttaaatagcaagggtgttgatctgcctatcatttcatttaatgagcacgtaccccraagttggtatgagataccagatgggaacaggatctcctggctctctctggtccctgtgtgctaagattgagcctagagattaagatgat

SEQ ID NO: 3112 - DNA, 179 bp, Homo sapiens
cattgctgattttgactgtaagtgcactctctgggcagacaaatcaatctgagagctggcaaccctcgggtaggatggtcactcacagcrgcagtatttttcacctttccctttagagatcctggtgtaacaaaaaacgactgggtagagtatcagaagacctggctggcaggcaccag

SEQ ID NO: 3113 - DNA, 179 bp, Homo sapiens
gggccggatgaaatggctgcctgacatttgggggcattctgtacaaaacactatcatcttaatctctaggctcaatcttagcacacaggraccagagagagccaggagatcctgttcccatctggtatctcataccaactttggggtacgtgctcattaaatgaaatgataggcagatc

SEQ ID NO: 3114 - DNA, 179 bp, Homo sapiens
cagaggccttctccatcttaattaaatatggcaatgcatactaataagaaattgagctatctaactaattgaaatgaaatgcgaattggrttttagaaaacaagaagtgcacagacaaagatgttttggaagcagtttttaaaaaaatgcaatggctttcctactgtaggatttcctag

SEQ ID NO: 3115 - DNA, 179 bp, Homo sapiens
gaggtgggcagatcatgacatcaagagatcgagaccatcctggccaacatggtgaaaccctgtctctactaaaaatacaaaaattagccrggcgtggtggcacgtgcctgtagtcccagctacttgggaggctgaggcaggagaatcacttgaacccaggaggcggaggttgctgtgag

SEQ ID NO: 3116 - DNA, 179 bp, Homo sapiens
cttgaatatttgaatattatttttttccttgagagagtcctattatataattaagaatccaaaggctctaaaagtctgataataataaakaaactagaattattttctttcatttttgaacccacttattatgggatgattgacatataaaagactgtacatatttaatgtatacatct

SEQ ID NO: 3117 - DNA, 179 bp, Homo sapiens
tcattaaaaaattcaacataaaattccattgtatagacagttgaattaaccatcttctttgtcaggcataggttcatttaaaacatgttyagccgggcgcggtggcttatgcctgtaatcccagcactttgggaggccgaggcgggcagatcacaaggtcaatagatcgagaccatcct

SEQ ID NO: 3118 - DNA, 179 bp, Homo sapiens
gggaagaattagagctatttttgcaaacaaccaattgcaaggattgcatgaatacattcttcctgtcaaatgtgaaaactggctgggcayggtgacccatccccgtaatcccagcgccttgggaattcgaagcaggaggattgcttgagcccaggaggttgaggctgcagtgaacagtg

SEQ ID NO: 3119 - DNA, 179 bp, Homo sapiens
aagtcttggccaccctggtgtgatatcaaacagctgctcagcggccctggaagccggctcccatatttctcctgctacacttacagcgarttgagcttcctggcggggcttctctttgaagttcaagagggccctgtgtatggtatgtgtgggaaggaaaactaagattcatctctcat

SEQ ID NO: 3120 - DNA, 179 bp, Homo sapiens
actaacagaggggtagcaaacacagagtggatatgctagacaaggggatgattcacatctaggatggagcacgatggtgtgagatttgaycatgctactcagaatagtgcacaatttaaaacatatgtattatttcttgaatatttcatttaatattttcaggttgctgttggccatgg

SEQ ID NO: 3121 - DNA, 179 bp, Homo sapiens
tgttttgcctttcccatttgccttgggaaggttgtaaagtacatgtcaattaccactgtaagcagctctagcaagggagtacggggtttyccaagaacacatatctaggggtctcaacctagtcgagggagttgttttacactaattctgttattttaaccttttctagttttatccat

SEQ ID NO: 3122 - DNA, 179 bp, Homo sapiens
ctgctcacatcccatgcttgatcaattgctaggtcctatacacacagatcctaaaatattcctaatatgttttgaatctggtcacctccyctaatcacccctccctagtctggaataacatcgatacttcctggccaaccgcagtggccccacccctaccatcctccaacttattattc

SEQ ID NO: 3123 - DNA, 179 bp, Homo sapiens
cctgtagtcccagctacttgggaggctgaagtgggaagtttgcttgagcccaggaggttgaggcttcagtgagctgtcattgtgccactkcactccagcctgggtgtcagagcgagaccctgtgtccacaaaaaaaaaaaaaaaaaaaaaagagagagaataaagatatgaaacaaaga

SEQ ID NO: 3124 - DNA, 179 bp, Homo sapiens
cgagctgcggatagtagccagcaatcagcccgctttggcctggagacacatcactctagcacctgcctctgtcttcacatggccttcccsctgtgtgtctgtgtctccaatctccttctgccttttctttataaggacacctgtcataggatttagagttccccctaaatccaggacca

SEQ ID NO: 3125 - DNA, 179 bp, Homo sapiens
gaccagcctggccaacatggcaaaactgcatctctactaaaaattagccaggcctgatggggcaaaactgcatctctactaaaaattagmcaggtgtggtggtgtgtgcctgtagtcccagctgcttgggaggctgaggcatacgaatggcttgaacccatgaggcagaagtagcagtg

SEQ ID NO: 3126 - DNA, 179 bp, Homo sapiens
agaattccatttctatcacttgctagcagtgcatttttgagcaaattactcaaacatttctacactttattttttatgcctaagatgacsgtaattatagcatcaccttatgattttgtttttgtttgtttttaagattagacgatattgcacataagtgcttagcatacagcctgaat

SEQ ID NO: 3127 - DNA, 179 bp, Homo sapiens
acatatgagattttgtgagcaagatgtgtttaacaataagtctgatgggttctttgtcatcctgcatcttttttttaaatttttttttawttttttatttttattttttggccttctagggaggaaagttaggatatttagctctgtggggcctgaatccctctcagtagccctatgag

SEQ ID NO: 3128 - DNA, 179 bp, Homo sapiens
aaataaataaataaataaataaacagaaaacaaacaaacaaaaagaataaagacagaatcctgcccaatgggacaggattcaaagactcrtacaaataaatgcaaagttataattctattataattgcaccagcctaatactaaatcccatgaagacgagttctgtctgtgaggccaca

SEQ ID NO: 3129 - DNA, 179 bp, Homo sapiens
actcttttagccacagctgaagaaatcagtcctggaataattcagtctctctctgatgcttgcttttctttctttctttctttctttctytctctttctttctctttctttctttctttctttctttctttctttctttctttctttcttttttccttccttctttctttttttctttc

SEQ ID NO: 3130 - DNA, 179 bp, Homo sapiens
acagtctcatgggaaacacagtgacagacaagctgcctgatgaaggaatacaaagttccagtgattagaattccatcgatccctttcctkggaaggaaagatcctgggttctagggctgcttggaagcatccttcctgccccaagtgacaacatcactattataaattgaagtgcatat

SEQ ID NO: 3131 - DNA, 179 bp, Homo sapiens
agcagaaatgactgggccagttctgaccccaggcttttggaggcattgcttgtttgtacttgtcctctcatgcttctgttactgctgtgmggagagctggtgttcctttggcctggggcccacccagaatggacacacttgggggcagactggagcccaccttgcatctggagctaagc

SEQ ID NO: 3132 - DNA, 179 bp, Homo sapiens
ttttgatcattctcaaagtttggaattattcacctcctgttggaggcaggagcctgaggcccagaggtgcaggggcacacccatagccayacagctggccagagacagagccagaactcaaactcagatctgtccagctccaacgtctacattcttccagctccaccaaattcttggtt

SEQ ID NO: 3133 - DNA, 179 bp, Homo sapiens
tttaatcctgtgctcaggaggttgcagtgtggtttgtggtactttaagacaccctggtctgaagctctggctgttgagatctatgttggsggggggaagcaaaataacaaagcaaaaacaaaaacaccccaaaataaaaaacaagctagctaaagaagtagttgtagacagcaaatttc

SEQ ID NO: 3134 - DNA, 179 bp, Homo sapiens
cattaagtgcctcttactagcctagggtcatatcattgccactcctagtaagggaagtgctcccttaaatgaacaaaacataaaagcaakctgcttgcatttaatgatacagcatgaggggccgggcgcagtagctcacgtctgtaatcccggcactttggggaggcggaggcgagagg

SEQ ID NO: 3135 - DNA, 179 bp, Homo sapiens
gcagcacaccagcatggcacatgtatacatatgtaactaaactgcacattgtgcacatgtaccctaaaacttaaagtataataataatawaaaaagaatattgaataataatacattttaaatatgtatataatatttacacattttaaaacactttgtactgtaataatacatttaag

SEQ ID NO: 3136 - DNA, 179 bp, Homo sapiens
ttctttcatggatctgctttcctctggtagatgaagcctgttgctttctttttctttttctttgtgtgtgtgtgtgtgtgtgtgtgtgtktgtgtgtgtttgtgtgtgtgtgtgtgtgtgtgtgtgatggagtcttgctctgttgcccaggccggagtgcagtggcgcgatctcggctc

SEQ ID NO: 3137 - DNA, 179 bp, Homo sapiens
aagtgcttggcttgtgtgtccatcctgcagtgaggctatctccaagggggctgactcatggctctagtgccatccaacagtttccagttyctagatgctgcctgactcagctctttatttgttccatcttttgttgttaccgggtcccatcctctatgttatttgggcatgccaaaaat

SEQ ID NO: 3138 - DNA, 179 bp, Homo sapiens
ccccccacccccgcaagttgcaactacccaggtccctctgtggaagcatcaggcaggcaatagctcaaattctttacactgagccctttkttgggtactgtggcgcttggctatgtcatgagacagaggtgcccaggacaccagagcagacatagtccacatgtgactcatgtgacccc

SEQ ID NO: 3139 - DNA, 179 bp, Homo sapiens
ttccatatctactggtcatctcacttcagggtccataatggaagcttgtgggtgatgcttcataaccctccacagaaggtattaatattytattttacacatgaagaatctgaagttcaggggtgcaaattgactttgtcctgtagcaaatgaacaactgagccagggctgaaacttct

SEQ ID NO: 3140 - DNA, 179 bp, Homo sapiens
tcctggccaaccgcagtggccccacccctaccatcctccaacttattattcatgcaatggccttagctcagcacctggcacacagggctwtcgataaacgctacttagtgtttttgtttttacagcaggggatcaatacaaggtagcccaatactacagtttctgcaattatcactgag

SEQ ID NO: 3141 - DNA, 179 bp, Homo sapiens
acgcctcaaaagacaatgattacatcatcttatgaactctccatgtaatcctccaccatccctgattgtacccattattttctttctttytaaaaaatcagccaggtgtggtggctcacgcctgtaatctcagaactttgggagaccaaggcgagcagatcgcttgagcccaggagctc

SEQ ID NO: 3142 - DNA, 179 bp, Homo sapiens
acatggcaaaaccccatctctacaaaatatgcaaaaattagctgggcatggtggtgcatgcctgtggttccagctacttgagaggctgargtgggaggatcacttgagcccggggaggtgaaggctgcagtgagcggagattgcgccactgcactccagcctggacaacagagagagag

SEQ ID NO: 3143 - DNA, 179 bp, Homo sapiens
tttgtcatcaaacatctgttccttaatgtcatcactaggaacatgcttctgttcctataagttcccccatttatccggccacccatccayccactcctctattcatctacatttttagcactcctatacatccactcatccatttattcatcctcttactacctactcatccatccatt

SEQ ID NO: 3144 - DNA, 179 bp, Homo sapiens
tttgagatagggtctcactccggttgtccaggaggcacgatcttggctcactgcagcctccgtctcccagactcaggtgatcctctgagytcagtctcctgagtagctgggactacaggcacatgccactatgcctggctaattttttgttttattttgtgtagagacggggtctcgct

SEQ ID NO: 3145 - DNA, 179 bp, Homo sapiens
atgcttacttccctctgcccttctaagcctcagcctccctatgcaaagatgccaagcatagttcctccctagcctcttcatttggagcayagctgcaatttgctcaaactacagtcaggatttagtaagcagggatttgaggatgtaaagttctatcacttacacttctaataactaga

SEQ ID NO: 3146 - DNA, 179 bp, Homo sapiens
gggtacctcttaagtttgcattttccaaaatgttccttgttcccttgcctgaataaactttcactgattccctgattcccattctaatayccaaaccaggcaaagatcataattcacaggagtaatatttgcagattaaaataaaaacagccacattctgcaagtaacattgatgtctg

SEQ ID NO: 3147 - DNA, 179 bp, Homo sapiens
ctcacaaaagccctatgaggctgatattgttattagccccattttacagttgagagctctgagtcacaaaacaattcatgttgcctagtyagcagcaaagctgggataaacccaggtgcctgctctttatcattacctttacttcctttcatgtatctatctgctctgtgatatattct

SEQ ID NO: 3148 - DNA, 179 bp, Homo sapiens
ctctgcacaataacaaacttgcgtatgatttcaggagattcacgggaagtcctgagccctctcttcctgttagaagtcctagccctgggmctaatccccaattagctcaagggtgccggctctggaggagtgggtgccctgggggcggggtgggcgggggggaagccgggtgtcggttg

SEQ ID NO: 3149 - DNA, 179 bp, Homo sapiens
cttttctcaaattggaaacaaaattaaaactaaagaacacaactgccaaccactgatgaggcccccagctgctgggttccaaactcactwtggatcccgttcagaacggacaggatgccaccggctggggcaggggtgactgcaaggatcatgaagtctcttgattatcaaacagtgtt

SEQ ID NO: 3150 - DNA, 179 bp, Homo sapiens
gttgactccagatctctggaagagcaggaaaacttaatgacgtggatgtcttaaaagactttttctataggcccaacagttttgctatcrcatgaccttagatgactcatcagatgcctgatggaagaaaggggagtagtgctcaaaatctgttccattagtctccctctgtgacttct

SEQ ID NO: 3151 - DNA, 179 bp, Homo sapiens
cttttgttttgatacagggtacaagagactcatggataaagttgaatgccaacaggttgatctttctagaacatgtcaaagttagcctayggtgacactggagcagaatatttaaaactggaaccaaccctgaatgtaggttgtgtagtaactgtggattctttgcaaataaaggtaca

SEQ ID NO: 3152 - DNA, 179 bp, Homo sapiens
aatttgaacatgtgctctcatcacgaggcccatgcttagagcaggcctggagcttctgggtctttataggggaatgtctaagtctcactytcctggtgatttatccctgtgaagattttttatcagaagtgaagttgtctttttttttttttttaagaaaaagaagtaagatttcattg

SEQ ID NO: 3153 - DNA, 179 bp, Homo sapiens
agatggcagcatccatggttctctcatttatcttcttagtcattttgtttattactctacaagccaccctgttcctatctaatcaggggkctgcttcctgtttttgttcactgccattcgccctgctggggcgatttttatcatcaaacagtatgaaaatagaatgttaggaattggca

SEQ ID NO: 3154 - DNA, 179 bp, Homo sapiens
aggacttttagaaacctaaatcatgcaagaagtctagttacccttaggctgccatgccatgaggaagccaagctagccatcaggaggagyatgtaaagagagagagacccatgagcagcctgccctgctccagacatcctagcctagacacacatgtgaagaagacatttggattttcc

SEQ ID NO: 3155 - DNA, 179 bp, Homo sapiens
attcattcattcattcattcattccagtagagatggggttttgctatgttggccaggctggtctccaactcctggcctcaagcgttctgmccacctcagcctcccaaactgctgggattacaggcatgagccacagcacctggcttgctgttgttttaagtcacattttggggtagttt

SEQ ID NO: 3156 - DNA, 179 bp, Homo sapiens
tgacaatgtctagtgagttgccacaactgatggatggtgctgttggcatctagtgggtagaggccagagatgctgctaaatatcccgtarcgcctaggatagcccctagcaacaaagaattatccagccctaagtgtcaatagtagcaaagctgagaaaccctgatgtaaggcaagtta

SEQ ID NO: 3157 - DNA, 179 bp, Homo sapiens
gggctgcacactcacataaacagggaatgtttattcacctgtgaacaagagcaacaaggattccatcctttatgtaggtagtgtcagccraatgaattagtgcacaaacaatagattctgagatgaattagacacacttcctggcatgaaggaccacaccgcctggatccaggtactga

SEQ ID NO: 3158 - DNA, 179 bp, Homo sapiens
gcatatcatattatctataatatatgcatatcatattatatataatatatgcatatcatattatctataatatatgcatatcatattatmtataatatatgcatatcatattatatataatatatgcatatcatattatcatatataatatatgcatatcatattatctataatatatg

SEQ ID NO: 3159 - DNA, 179 bp, Homo sapiens
cgatgagagcacatgttcaaattccacctataacatttacgtcctgtgtgatctttggcaactttcttattctctctgagtcttagctcyatatttatgatgttgacttaataacttctatttcttatagctgtgatgataatgaataggattgcatgaataatggccaatacattgtc

SEQ ID NO: 3160 - DNA, 179 bp, Homo sapiens
atttaactcctttagggaaagcaggatttctctgcatcatctagaattgggtcagagaccaatgcagctctaggggccacacaccctcargtaccccactgtctgcctgtatggcagcaacagcttaagcataccctgagaatgaccctgtatggcacacacaacagcaataacttaag

SEQ ID NO: 3161 - DNA, 179 bp, Homo sapiens
atgacatcaagagatcgagaccatcctggccaacatggtgaaaccctgtctctactaaaaatacaaaaattagccgggcgtggtggcacrtgcctgtagtcccagctacttgggaggctgaggcaggagaatcacttgaacccaggaggcggaggttgctgtgagccgagatcatacca

SEQ ID NO: 3162 - DNA, 179 bp, Homo sapiens
taggttgagttgcaaaacgtaccgcgtagacgcccctggtggcgccgagagaagagctaggcctgcccagcacagagccggagagcgtcrggccttccggaagggtaagttctccgccaaggggtcccgagggagctggacgtctgaatctggacttgcccccagcttcggggttcgat

SEQ ID NO: 3163 - DNA, 179 bp, Homo sapiens
catcctacggacacaggccatacagggggattggggcactgagggttgggttaaatgaaggctaccaggtggaggttaggggaaggtgawgaggaagctgtatgaactgcacgctttttattttaagacagagtctcgctctgtctccccaggctggagtgcagtggcacaatctcagc

SEQ ID NO: 3164 - DNA, 179 bp, Homo sapiens
tacaattacaaattacccaattacatttaaatttttgatacataacaaataattctagcataagcatttaggacatacatattttttaastctgttttttattttgaacttatatataatttggtgtcctgtattttatctggcagccctaccccttaaggatatttctccaagtatct

SEQ ID NO: 3165 - DNA, 179 bp, Homo sapiens
ttctcccttaatagggctgccagatttagcaagtacaattacaaattacccaattacatttaaatttttgatacataacaaataattctrgcataagcatttaggacatacatattttttaagtctgttttttattttgaacttatatataatttggtgtcctgtattttatctggcag

SEQ ID NO: 3166 - DNA, 179 bp, Homo sapiens
gacatcacagtgctccccactcattctttcctttccaagtcactgttaactgcggatcagcagccaaaccctgtcctggttcttttgcayggaatttggcatagttcacaaatctaggttttatagaaggctctcaaatttagctcacactaaaattgagcatttttatcccatctctt

SEQ ID NO: 3167 - DNA, 179 bp, Homo sapiens
tctccttcctgcctccatgccacaatggtgtcttgctgagtgggcaagaagggtcagcactttatatgacttcctgagggaaggaaaagycaaactcttagggaagcccaggcagaatcttctgtcttcttggttgcagcttggcctcttacatttacagctgaagccttcggccagtg

SEQ ID NO: 3168 - DNA, 179 bp, Homo sapiens; identical to SEQ ID NO: 2758

SEQ ID NO: 3169 - DNA, 179 bp, Homo sapiens
catttgagagccctattacaccatctgcatgccccttgtttatactaggaaaatgcagagaaagacaaacttaaagaccccacatcttckttcttacctttttctgtctagaccccagagtaagttaacagccacagggattcataccttctctggcctctctggttatgagaagtact

SEQ ID NO: 3170 - DNA, 179 bp, Homo sapiens
tgagtaaggataaatgctaagtgcatcagttaccaatgctttgggctacaagtgacaatattcccatttaacagtatcttaattcaagcrtgtgttatctcattcaacaaaaagactagtggtaggcagttcctgggctgactcagtgtttcaacaatgtcatcaaaggcccagcttct

SEQ ID NO: 3171 - DNA, 179 bp, Homo sapiens
gcgggagaactcctccccaacccacccccacacacatacacactctgaatacattctacagactaatgggaaacaaaaataaaattgttktatgaccaccccttcatccatgccttgtatgatatcccaattacactcaaagtgaagaaaactttttaccacctcctcgctacatatat

SEQ ID NO: 3172 - DNA, 179 bp, Homo sapiens
agctggttccttttgaatgtgacttcttgatccttcttccccaaggggaagaagatgaaccttaaaacagacaggacaaagcccaagagkgggggaggagtgggtggcatcaatgacagcagttctaggagtttctctgtggcaaaattagtatggcgtttttttgctcagcattgttc

SEQ ID NO: 3173 - DNA, 179 bp, Homo sapiens
catgcttagagcaggcctggagcttctgggtctttataggggaatgtctaagtctcactttcctggtgatttatccctgtgaagattttktatcagaagtgaagttgtctttttttttttttttaagaaaaagaagtaagatttcattgcagaatgggttcaatatatgtctatgttta

SEQ ID NO: 3174 - DNA, 179 bp, Homo sapiens
ctcatcttgaattgtagctcccataatccccacgtgtcctgggagggacccagtgggagataattgaatcatgggggtgggtctttcccmtgctgttctcgtgatagtgaataagtctcacaagatctgatggttttataaagggcagttcccctacacaagctccctgtactcccacc

SEQ ID NO: 3175 - DNA, 179 bp, Homo sapiens
atccatccatccatccatccatccatccatccatccatccatctatatctatctatctatctatctatctatctatctatctatctatckatcgagagagagagagagacagaggctcgttctgtcacccaggctggagtgcagtggtgcgatctctgctcagtgcaacctcagtctcc

SEQ ID NO: 3176 - DNA, 179 bp, Homo sapiens
ttgggaggctgaggcaggagaatcacttgaatccaggaggcggaagttgcagtgagccaaggttgcgagacggcactgcagcctggtgayggagtgagactccatctcaaaaaaaaaaaaaaaaaaaaaaagagcctcacttcccaatgcaaaaagaataataatgcttatagttctct

SEQ ID NO: 3177 - DNA, 179 bp, Homo sapiens
agaaggagagcttatccagaagaccgataattggagtttacccacatgccagcttgtagagaatacaagtttttgctagtacttaatagrcatgtttactgggtgggttgagcttactctaccagaaggctagtgaggttacaagttctcttaaagcagataatcccatagtttggggt

SEQ ID NO: 3178 - DNA, 179 bp, Homo sapiens
ctagacagagttgtacagaaccaacaagaggagctaagaatggactttagggctgggcatggtggctcatgcctgtaatcccagcacttygggaggctgaggcaggcagatcatgatgtcaagagatcgagaccatcctggccaacatggtgaaaccccatctctattaaaaatacaaa

SEQ ID NO: 3179 - DNA, 179 bp, Homo sapiens
tcctggcctgccataaatgttggctattattgcacctcaaatgctaacagatttgtgagcctaaaatactcacattgctctcttggtggytgtgtagacataagtaggactcttctaaaatattaatgcaaaatgctggggagggaaggaaacaggaggcgttgggttagaagcgggag

SEQ ID NO: 3180 - DNA, 179 bp, Homo sapiens
gggatagcattaggagatatacctaatgctaaatgacgagttaatgggtgcagcacaccagcatggcacatgtatacatatgtaactaamctgcacattgtgcacatgtaccctaaaacttaaagtataataataataaaaaaagaatattgaataataatacattttaaatatgtata

SEQ ID NO: 3181 - DNA, 179 bp, Homo sapiens
caagcccttcactgaattttgcatagagctgggatgaaacccaaaattgtggtttaaagcccactaaagaccatgcaactgaggctggcrgagatgtggagaagaatctgggttttccaactccaactccaataccctttccactgcaaaaagcataataacgctcgtagtttccttgc

SEQ ID NO: 3182 - DNA, 179 bp, Homo sapiens
taaaggtgtgcaaaacccttcactgaatcaagttcttgtgggggattttcccaggaactggggagatcagcttaataaagaagctgtaasgtgtgaaaaggctccacacacaatgggtccagatcttagctctgtgaagttacttggcctgcttaagtcttagtttcttcagctgtgaa

SEQ ID NO: 3183 - DNA, 179 bp, Homo sapiens
cctgctatcttgtgaataaggcaccttgtttcccctttgccttccaccatgattgtgagtttcctgaggcctccccagcgatgctaaacygtgagtcaattgaacctctttcctttataaattacccagtcttgggcagttctttatagcagtgtgaaaatgaactaataccgtgggtt

SEQ ID NO: 3184 - DNA, 179 bp, Homo sapiens
aaatagaatccccaaattaaaacaacaataaaatttgcaataattcattttaaagacagtatcaaagaaattgcaacattgtggagattrtgtcacaatttgttctctgttagtgtgtaaaatgataaaacctttctggaaagtgacttggcgatgagcttcaatagttttacaactat

SEQ ID NO: 3185 - DNA, 179 bp, Homo sapiens
gctaaactgtgagtcaattgaacctctttcctttataaattacccagtcttgggcagttctttatagcagtgtgaaaatgaactaatacsgtgggtttgttttggtcatggttgtaatcgtcagcactttgcacagtgcctggcacatagcaggatgtcagttaatgttgttatatgag

SEQ ID NO: 3186 - DNA, 179 bp, Homo sapiens
gaaacacccaagccccttgggctggtgaaggcttcgagcagagctgtgatgtgtgcagtctcttaacgaccaggcttctgggagggcagsggggaagaactgggggagaagttactgtttgtcttcctatgtgaggatgctggttggatggtctaatgggacctagaagcaagaggaag

SEQ ID NO: 3187 - DNA, 179 bp, Homo sapiens
ctctaaagggagttgcttttaattccttgaatgcttcagcctcaggacctttgcacaggttgttctggccactgttatctctacacagcyttctctgaagactttagttgtcaccccatagctgctgttaagtgctttcagtgttaactcatttgatactatgaggcaaaccttattac

SEQ ID NO: 3188 - DNA, 179 bp, Homo sapiens
gaactcgcccgccctggcctcctggagtgttgggattacaggcgtgagccaccgcgcccgacggcatctaggttttgagtagtagttagrcagctttttcccacacacatgtaaaaagggtatttgagggacaatgggaaaagttggaataaagactgcattagataactgtattaaat

SEQ ID NO: 3189 - DNA, 179 bp, Homo sapiens
tatgattattaactcctatgctttgtgcgttagtccattctcaagctgctaataaagacatacctgagactgggtaatttataaaggaargaggtttaactgactcacagttcagcatgactgaggaggcctcagaaaacttacaatcatggcagaaagggaagcaaacacgtccttct

SEQ ID NO: 3190 - DNA, 179 bp, Homo sapiens
tgaccatgtgcaaaacacgtgctgaggctttacatacatatctaaatgaatcaccacagaccctatgaagagggtgctatgatgttcatscccatttcacagataaagaaactaatgcacagaaacattaatttgtcatgtgttactctgcaattaagtggcagagctaggactagaat

SEQ ID NO: 3191 - DNA, 179 bp, Homo sapiens
tactacaaggctacagtaagcaaaacagcatggtactggtaccaaaacagagatatagatcaatggatcagaacagagccctcagaaatratgccgcatatctacaactatctgatctttgacaaacctgagaaaaacaagcaatggggaaaggattccctatttaataaatggtgctg

SEQ ID NO: 3192 - DNA, 179 bp, Homo sapiens
aactaatatgtctaggtctggggtgaaggtggggggcctgtctggatacctcctccctcaattgaagggctcgttggaaacataggaacycactgctctctgggactctggaaagacaaattttctttggcaaacggaacagtgtcgcgctgtcgacagagcagactatttttcttgtt

SEQ ID NO: 3193 - DNA, 179 bp, Homo sapiens
tccaaaaccatcaagatgggaaataccccaagcaagacagggagcaagagggataaagatggtaacaaagatatttccccagatagtccstaggtctcatgttaaaatactggaaggataatgaaaggactaaacataggaaaaagcaacaaatgataaaatattgctcttttgtttga

SEQ ID NO: 3194 - DNA, 179 bp, Homo sapiens
cacacacccctaggctgaaagggggaagggagggagagcattgcaggaaaggctgccccaggagcggagccctttgctcacagtgtgcgrccagccagaggaggaagaagccaggccatcaacaccctgatctccttttcttccctccttccaccctcctgtgaggctccctatgggct

SEQ ID NO: 3195 - DNA, 179 bp, Homo sapiens
ggatcaaattcctgcccttcctgttgtccaatgtccagaaaacataattcaatacatttttcagtgttctcctttttttaaggtggaggygagtaataagaccccttttacttatcttggctagaagtggaaattgcagaagtaggtgaaggcaaatcctgaattcacatcatttcgct

SEQ ID NO: 3196 - DNA, 179 bp, Homo sapiens
cggtcccaaactgaaaatcccatggggctgtatggttactacagagagagctccagtgacctggagtggtctagctggggaccagctgtytctgagtaggcatattccggaaatatcatcccccaacccatattgccacctagggttttgccagatccccatgtgtcatttgttttttt

SEQ ID NO: 3197 - DNA, 179 bp, Homo sapiens
tgtaaattgaagtcattgtaagtgtgtgtatgcatggccttggttgtgatgtgtgtgcctgacactgaagggggagatatactgggggtrgggggcagtgtgtggttgtgtgtgagggtggacaacagggagtgtaaatgtgactgtgagtgtgtgtgtgactgaactgatgtgcattt

SEQ ID NO: 3198 - DNA, 179 bp, Homo sapiens
tgacgccaagagccacccgctttccagctcgtcccactccgcggatgtttacccaccttcatgcgcagaggaggagatgaaacactgggratatcttgttttccacactaggaatggagcacaccaacttccatggtcccagtctcccctaagtgggacctacagcttggtgggactct

SEQ ID NO: 3199 - DNA, 179 bp, Homo sapiens
gtctttctgtctttctttctctctctctttccttccttccttctttctttcttttttttttttttttttttttttgacagagtcttgctytgttgcccaggctggggtggtgcagtagcacaatctcgactcattgcaacgtctgccttccagattcaagcaattctcctgccgtagcc

SEQ ID NO: 3200 - DNA, 179 bp, Homo sapiens
tgtatttctgtaagtgctttacagtgtagaaaatatattactacagtggtgtatataccatgtgtgtgtgtgtctgtgtgtgtgtgtgtrtgtgtgtgtgtgtgtatatatatatatatatatataattacatgctcaaatatttctttataatagggtgcatgatcaacaaagtataa

SEQ ID NO: 3201 - DNA, 179 bp, Homo sapiens
tgacctgacttacagaaactgagaaaataaatgtgctgttttcaactgagtttgtggcaatccattaagcagcaataggcaactatatgrcatagtaattgcctctctttcacagatgaggaaaatagggtttggaaacatggactaagttgcccgagagacacagctaggaacctgca

SEQ ID NO: 3202 - DNA, 179 bp, Homo sapiens
tctggttccattgaacttcatcaggggcgggtttgagaaatgagaccacagatagaaaaaacattaaggtatgaatattcaacatatcawgtagtgatttgttctacgaagaaaagctgcgcagggtagagtaaaaggtgatggagagttatatgaaagtatgacttaaatgaatggtc

SEQ ID NO: 3203 - DNA, 179 bp, Homo sapiens
cgggaggcggagcttgcagtgagtcgagatcgcgccactgcactccagcctgggcgacagagcgaaactctgtctcaaaaaacaaaacamaaaaaaaaaaaaaacaagactgagtgagaaacaaactgctggggctgtttgttactgtagcataacctcgccttccctgacacatacaa

SEQ ID NO: 3204 - DNA, 179 bp, Homo sapiens
cctacaaggtgccgccttctgtggacatccattttgatcattctcaaagtttggaattattcacctcctgttggaggcaggagcctgagrcccagaggtgcaggggcacacccatagccatacagctggccagagacagagccagaactcaaactcagatctgtccagctccaacgtct

SEQ ID NO: 3205 - DNA, 179 bp, Homo sapiens
actgtacatatttaatgtatacatctcagtgagtttgggaaaaaactatacattatgatgccatcacctatcatggccgtagacatacaygtaaccttccaaagttttctcttgcccccattatgatgataatcatgatgattattttggtaccaagaacacttaacataatatctacc

SEQ ID NO: 3206 - DNA, 179 bp, Homo sapiens
gcggataaagcccaagctgggcctctgaccttcagccaggaaattcctcagttttctcctctcccaaatgcggagaaccactcagcaaasggagaaggaggcagacagcaacaggcagcctagggcatcgaagatgatgggccaactgttaccagtaatgaaaataataatgaaaggaa

SEQ ID NO: 3207 - DNA, 179 bp, Homo sapiens
gaggttgaggctgcagtaagccatgatcacactactgcactccggcctgggtgacacagcaagaccctgtctcaaaaaaaaaaaaaaaaraaaaaagaaaaaaaaaaaccccaaaaatctgatgaacacattagattcatgagtctttttcttttttctttaaaatactttaagttctg

SEQ ID NO: 3208 - DNA, 179 bp, Homo sapiens
gagatatattcacagttcaaaagtcaggtgctgagagatggtttaaagacaaattcatgaaggtatattttgtgttatagttgttgatgrgttctttggttttctgtatttttccccctctctttaaaacatcactgaaatttcaataaatttttattgaaatgtctttgggccttgtg

SEQ ID NO: 3209 - DNA, 179 bp, Homo sapiens
aacccttcacactagtctcagtttcatgcctggatgtcacctcaccctgactcctattcctgggctggggctggcataggaggagaaggsaattgaaataaaaaaatcaaaaatgaattcaaagcatttcctggctcatgaaaataatgtaaaataattttatgattgcttttattcat

SEQ ID NO: 3210 - DNA, 179 bp, Homo sapiens
tattcagccacatgcacttccttaactgggcaggaatatttcacacctctgcctatgatcttcatcctaaccttacctacctggtagcaycatgcttttctctgcctcagacatctgcctggctcattcacttaattcatttaggtctttgctcaaaattcaacatcttagagagatta

SEQ ID NO: 3211 - DNA, 179 bp, Homo sapiens
cttttgctcagtaaccagctagaaagtaggattggtttttcctctagattggcagctagggctggcagctcataaacaccagtcaggaayggatggtacttccaacactgctttggttcacataagtgattgggtgttaccttacaattaatcctttgtggtataatatggtaacagac

SEQ ID NO: 3212 - DNA, 179 bp, Homo sapiens
tgatggactgtgcttgtgtagtcactgttatctgcacaggtagctttcagagcactcctcattgcaacaccctaggaggccaagtagggyacctagttcagagcacctgtgtcttaaaagcagaaattcagtactcagcttactacatgccaggcaattttaagcccgtttaatagtgt

SEQ ID NO: 3213 - DNA, 179 bp, Homo sapiens
tagctgaagctctaacagaaatcttggaatataatgcaaccttgggaatgaatgccttgcacagagtgacaagcctggagattttgaggscctcttccaaaaaaagcaaagtttggggaaagagaatgtcagttttcttggcttcaagactagacttaggaagactcagggtagagtag

SEQ ID NO: 3214 - DNA, 179 bp, Homo sapiens
tgagaatactaagaatctctacctcaaagcgttttaaggaccaaatagaataacccatataaactgtttcaaacagtgcctagcacatastaagttcttaataatggtagtttagtttttttttaagttcagcagtgtccaattgcttccaatggtagcttttaggtgtagattgttaa

SEQ ID NO: 3215 - DNA, 179 bp, Homo sapiens
acatttaccagcacacaaactggcaaaggggattcaaggagaacattatagataatagggacagttcataaaaaggccccatggtagagrgtaacatgacatatctgagaaattgaaacaagtttcattgagaatactaagaatctctacctcaaagcgttttaaggaccaaatagaat

SEQ ID NO: 3216 - DNA, 179 bp, Homo sapiens
cccaatatccactccatcccttcttcctcaacttaacagaactgcaatattgttcagagtagcaaggtactcagttacaatatttgtgaycccaggctctgtggagttcaagaaagccacagcactcagtgttgaccaaaaagacataactgagggtcttgggaaaaaccccctttctg

SEQ ID NO: 3217 - DNA, 179 bp, Homo sapiens
tctgtcatccatgtccattgatccattgatggacacttaggttgattccatgtcttggctgatatgaataatacaatgaacataggagtrcaaatatctctttgacttactgattttatttcctttgggtatataattcagaagcgggattgctggatcaaatggttctatttttagtt

SEQ ID NO: 3218 - DNA, 179 bp, Homo sapiens
gaatgacctaagctgtcctgagtagaggtaagaacactggacctctgtcctgttgattagtctctggctggaacagtgtcaggaaatggsgtaacctaggaggcagctcttttcaggggctgaccaatgagggctgtctgctagtaagtgaagacatcagaatgaaggggataggaggg

SEQ ID NO: 3219 - DNA, 179 bp, Homo sapiens
tgatatgaataatacaatgaacataggagtgcaaatatctctttgacttactgattttatttcctttgggtatataattcagaagcgggrttgctggatcaaatggttctatttttagttttttgaggaacctccatactgttttccatagtggctgcaccaatttacattcccaccaa

SEQ ID NO: 3220 - DNA, 179 bp, Homo sapiens
ttactgattttatttcctttgggtatataattcagaagcgggattgctggatcaaatggttctatttttagttttttgaggaacctccayactgttttccatagtggctgcaccaatttacattcccaccaacagtgtaaaagagttcccttttctccacaccctggccaacattcacg

SEQ ID NO: 3221 - DNA, 179 bp, Homo sapiens
tgccttattacttaaatatattatcacggcctggcctcggccagaatggagggattaaagcaataaaactaaatggacaagtggccagtrttagaatttttcttactcagaacctctgtaggtaatggtacacagctgtaagcaccctgcccccacccgtgcttccttgctgcacaagc

SEQ ID NO: 3222 - DNA, 179 bp, Homo sapiens
ggggagagggaaagtgagtttctttctgccaggtggagacgatcaggtcacactgtactccaactgctctgtgcacagaaataagcccarctataacctgggttaagaacactcccttaaggcaagaagggatgcatgaagtaggatacaggctgctggaagtcatgttcttttctcaa

SEQ ID NO: 3223 - DNA, 179 bp, Homo sapiens
tttttttttcatcagtagggaaagttcgtgttgaatctttgacaattcctcctccaggctcctggacctaaagccccattgtcttaaaakgttttcaactagtgaatcatcctttgtcttgagctaggtgtcattttgcatatctacaacaagggccagtctaactgctgggtgcaaga

SEQ ID NO: 3224 - DNA, 179 bp, Homo sapiens
ttgtagagtggtatagaaatgactgacgtttgggaaagcttgtcctgaaggatattttccatccttttaatgacccctcaacattttttyttcttgtttctcacactattttgtcatcaccaagccacccccttactaccttcaaacctggagcatctttgtatgtaatggtgaattaa

SEQ ID NO: 3225 - DNA, 179 bp, Homo sapiens
tcaactattggaagcaatatacttgccagaggctgtagccataatccactgtagaaggcatcaaaaggacttaaccccaatagcacaggraacaaagaggccaaagcagccctggggtgcaatctcaaatcttagcaccacttcctttctatgactccaatagaacccgaatatatacc

SEQ ID NO: 3226 - DNA, 179 bp, Homo sapiens
gccaggtgatggggtgtgtgcctgtagtcccagctactcagaggctgagaggtaggagaattgcctgagcctagaagggtgaggctgcartgagctgtgattgcaccactgcacttcaacctggatgacagagcaagatcttgtcgcagaaaagtgaatgaatggatgggacatagtga

SEQ ID NO: 3227 - DNA, 179 bp, Homo sapiens
actgtgcttcctgtgcctaatggataagttggtcccttctgacccaattccctgttcattcattccttccttccttccttccttccttcmttcattcattgagcaagaattcatagagcagcgtctcaatgcagagaccagcaccagtctttagcatgggggtgctgggatcccagacc

SEQ ID NO: 3228 - DNA, 179 bp, Homo sapiens
tgatactctgatttgttaaaaggtggagaattgagctatgtagctcagatagcctgagcttagtactagctcagtcttcacttctggctrcaagataccacaccttttgagattcagggaggggagagttttagcagcacatagtatctgttagtgcctttatactactagaaggttag

SEQ ID NO: 3229 - DNA, 179 bp, Homo sapiens
ctccaacacttacagatgtgagaccctatcctaggaacagagatgaggtctgcatatttactttgtgagcatcagttgttacatgatggkaacatccccttaagtagcatttcaaaataaaggtagccaagaaatctcatgccaccttaaggctcagaagtatggagatttccctctta

SEQ ID NO: 3230 - DNA, 179 bp, Homo sapiens
aaatgtcattaaatcaacctcaaagacaaagaatggacaattcgtttgagatttttgacaatttggggcttctctgcagtgttgttttcytctgggagtgcaggtatgctatcagggaggctccacgttgatctgagtcagctccgagctcagagccgcacaggctcctctaaattggc

SEQ ID NO: 3231 - DNA, 179 bp, Homo sapiens
caataaggtccaggctgaggtggtctcagatggagatgaggaacttgttgggaactggagcaaaggtgactctttctatgctttaacaargagactggtggcattttgaccctgccctagagatttgtgaaactttgaacttgagagagatgatttagggtatctggtggaagaaattt

SEQ ID NO: 3232 - DNA, 179 bp, Homo sapiens
ctcatacagttgccgtgagaattacatgagttaatggatgtaatatgtttagcatatgtattagtggtagtaatagctctgttggtgagwaccatttttgcacatgatttcctgcttcttcagatgctgtcccagtaaagagaccttcaggagaagagctactttatgaacacaggccc

SEQ ID NO: 3233 - DNA, 179 bp, Homo sapiens
agctaatttttgtatttttagtagagacggggtttcaccatgttggtcaggctggtctcaaacccctgacctcgtgatctgcccacctcrgcctcccaaagtgctgggattacaggcatgagccaccacacccggcccacacctggctaatttttgtgtttgtattagagaccaggttt

SEQ ID NO: 3234 - DNA, 179 bp, Homo sapiens
aaaactgcggaatgcctcagcttagtagatttaaatgggggatgagacggggaaaatcatttgtgatgtgtgtgtgtgtgtgtgtgtgtktgttggttttgatcaggaaaaaaaaaaaaagagttcaaaatccacctgggagaaacactgacacatatgccagagaagcattgatagtc

SEQ ID NO: 3235 - DNA, 179 bp, Homo sapiens
gatgcttgacacagaggaggggtttagtagataattgttggatgggtggatgggtggatgggtggatgggtggatgggtggatgggtggwtggatggatagaaatcatcaatgatagaggaattgcagatggggcatgggggagaaaggataatggattcaggttgaatatactgtctt

SEQ ID NO: 3236 - DNA, 179 bp, Homo sapiens
tcacgcctgtaatcccagcactttgggaggctgaggtgggcggatcacaaggtcagatggagaccatcctggctaacacggtgaaacccygtctctactaaaaatacaaaaaattagctgggcgtggtggcgggtgcctgtagtcccagctactcgggaggctgaggcaggagaatggc

SEQ ID NO: 3237 - DNA, 179 bp, Homo sapiens
gcagggtggtcaggagagcatagctgctgaaatacagtaacaaaatggcagaaatcccctccctccctccctccctcccttccttcctcyctctttctctctctctttctttcttacactagccatcctatcaggtgtgaggtggtatctcattgtggctttgatttgcatttccttga

SEQ ID NO: 3238 - DNA, 179 bp, Homo sapiens
gagcgaatgaagcagaggcagattacctgaacaggggacagttcctgggcttgctggcagagtctctcctcttctctgcctaagggctcygccccacctcatggcagcctgcactgccttcctgtctctctttgggatggttcaagggtgcattctatgcagctccccagtggaaatcc

SEQ ID NO: 3239 - DNA, 179 bp, Homo sapiens
ttgttgtggtttttttgttttttttgtttgtttgtttttgagagagtgtctctctctgtcacccaggctggagtgcagtggcacggtctyggctcacttcaaccttcaagcgattctcctgcctcctgaatagctgggactgcagatgagcaccaccatacccggctaatctgtgtatt

SEQ ID NO: 3240 - DNA, 179 bp, Homo sapiens
gttgcagactaagttgctactcaggagacccattaccagggggattggcacccatggggcctcagggaagaagctgaacagcctgtattscatgcaaagacaggaagttaaggcgcctgattccagtcagaataagggcataggtgtagaattagtaagacaggacttaacatgtccac

SEQ ID NO: 3241 - DNA, 179 bp, Homo sapiens
tccagctctgggggaaagttcatagactactgctaagctaatagcctcttccatttctggcttagccaagttcaggaacatcatccttcrtagctctaaaaactagactaagcaaaagccaggcaaaaactcattgtcagaaattcttcattctgtgcctgggagtgcactcttggttg

SEQ ID NO: 3242 - DNA, 179 bp, Homo sapiens
ctgtgcgacacttgtttgcagatatgtcactgccatgttttccattctggtccaatatagatttttctcaagttggccacctaatacacrgaggtgtgattcaggtcccctcagcagggctgtagtgacattgtgacatttgaactaggaattggaggaaattgatgccatatatcaga

SEQ ID NO: 3243 - DNA, 179 bp, Homo sapiens
gcagatatgtcactgccatgttttccattctggtccaatatagatttttctcaagttggccacctaatacacggaggtgtgattcaggtyccctcagcagggctgtagtgacattgtgacatttgaactaggaattggaggaaattgatgccatatatcagactcaatgccagtagctt

SEQ ID NO: 3244 - DNA, 179 bp, Homo sapiens
ataacatgggaggagactaaggtgaatgaacaatggtttaaagagcaaaaacattgcctattaaatagcaaatgaaatgtctatttgtayggacaatagaaatacctatttgtagaacggcgatagaaccataacgtgccatattttgccaaattttgcaagtattaaaatggggaagg

SEQ ID NO: 3245 - DNA, 179 bp, Homo sapiens
agaccagcctgggcaatatggtaaaaccctgtctttacaaaactgaaaaattagatgagtgtggtggcgtacacctgaggtcccagctaygcaggaagctgaagtggggcaatcactcgagtctaggtggtcaaggatgcagtgagctgagatcacaccactgcattccagcctgggtg

SEQ ID NO: 3246 - DNA, 179 bp, Homo sapiens
ttagagaatctctgtctccctgctaaaatataaccacctgggatccccttctaacatattatatgttttatctatttattttttgttaaytaatctccttaaggattcattaaggacatcattaatgagtcattaatgaatttccttaaggaatctatccctgatagaatataaccacc

SEQ ID NO: 3247 - DNA, 179 bp, Homo sapiens
ggggacagctgcttaatgtcaactctcatgtacttcccttaaagcaattccaagtgaagtttagagacagcaggtgccagggagaagaakattagtcttcacaaagcccctactatgtgccagtcctggtgtgagctcagcgatcattttatatcattcaatctggcgatttttagccc

SEQ ID NO: 3248 - DNA, 179 bp, Homo sapiens
aaatatgtataatgtcagtaaccacaccgtggtgacgttataaaaattaaatgagaacatgtaaagtaaagcactgtgggcaaacagtamggatcaaaacacaataaatagtcatttaaaatgaaggccaggcacattggctcaggcctgtaatcccagcactgtggtaggccaaggcg

SEQ ID NO: 3249 - DNA, 179 bp, Homo sapiens
aaggccatccagctagcatgtgacagagcttgggttcatgcccagggcgtctgactacaaatttgttactctttctactgccaaagtggycagggtgaatgggccctgtgaacaccttcaatcccactccttggtcatgtagacctggtaaagatcaatgccaccagaatccaggtggt

SEQ ID NO: 3250 - DNA, 179 bp, Homo sapiens
ttagccttcctgactctttattgctttaattagctgtttggtgacctgacagtctctttgatgcacgtccagcgtcggcctgtgaaatayggggaatgtcagcttgtcgaacaagggtcagctagactatcaatactgttgtccatcaggcagatccaggctgggtgttggcctgcaat

SEQ ID NO: 3251 - DNA, 179 bp, Homo sapiens
taaataaaagaaaccatttaaaagaaaaagttaggagaccatgctagtctaagccacatgggtatgtaattggaggaagggatagtgatytcattagcaaatcagaacctctagtgcatttgatttagaaagagtgctcacgattatgaataataatatggtgcattagttctgctgtt

SEQ ID NO: 3252 - DNA, 179 bp, Homo sapiens
gcctgataaaggactgatgctcaagtgatccttttgcgccaactaggaagacatgacagacaccaagaacagctcagcctgtgctgggawggatgaaagagagtggccgaggagctaatgcaccctacagccaggcctctagatctagaccccagccatgaagaaatgtggaggtgagg

SEQ ID NO: 3253 - DNA, 179 bp, Homo sapiens
aaccagaataggttgacagagactttggtgctgcctcatggttgaacaagaattacggaattaagaaaaaggaaagctacatacagaaawtggaagtgaggcacagaaacagccagattggttatacagcttggcatttgccttatttgaacatggtttgaacagtggatgcctttaat

SEQ ID NO: 3254 - DNA, 179 bp, Homo sapiens
tcagaatattaaaagaacatctgtaagtgactaatcggaagataaatgacacaattaaaaaatgggggctggctgggtgccgtggctcaygcctgtaatcccagcactttgggaagcccaggtgagtggatcacttgagcccaggagttcgagaccagcctggccatcatggcaaaacc

SEQ ID NO: 3255 - DNA, 179 bp, Homo sapiens
ttcctatccccgtgtcctagaattcgagtagtgaccttcactgtctttgttcgtggctgcaagtaccaggcaactttgtgaaatgtttcrtataatgaacagtagtttattaaatattatagaagaaataaatatgtgaatgaccaagttagtgaatgagtaaatgactgaatgactga

SEQ ID NO: 3256 - DNA, 179 bp, Homo sapiens
agccactttcaggcaccatcatatttgatgcctcataagaatactgtgaatatggctgggcacagtggcttatgcctgtaaccccagcaytttaggaggtcaaggtgggtggatcacttgaggccaggagttcgagaccagcctggccatcctggtgaaactgcgcgtggtggtatgtg

SEQ ID NO: 3257 - DNA, 179 bp, Homo sapiens
tctcatgtcctgtgaagagaaaatagcagggaggaagggagaaaaaatgacaaacgaaagaacaatccgggaaaaatcgacataggccaycttactctgaagtccatacattagtaggcagatatgaaagtggtttatgtataggttgtataccacactttttttatctgttcattttc

SEQ ID NO: 3258 - DNA, 179 bp, Homo sapiens
tactccagaggctgaggcaggagaatcacttgaacccgggaggcagaggttgcagtgagccgaaattgtgccactgcactccagcctgaygacagagcaagactccatcttaagaatgaataaataaataaataggcaaagggattttcaagacacttcacagaaggagctatgtgaat

SEQ ID NO: 3259 - DNA, 179 bp, Homo sapiens
taactgcttatttgtattttctatttctcctgcagcaaagttgaatttcctgtgtaattaaaataataaaagcaaatataaaatagacaraaaagtaaaactagatttgtccccttaaaaatatgtcaggattaggcaggacacagtggctcatgcccataatcccagcagtttgggag

SEQ ID NO: 3260 - DNA, 179 bp, Homo sapiens
aaagcagcttttaaggggaaggcaaaatatcaccattaaaaaggaaagccccttgagtttaccttatcattctggtatgcagtcacagcratgaattcagtttcggggaacaagtatgtccgaaatgtactataagggagtttcaagatgtcattggctcttacaatgtggaaccgggg

SEQ ID NO: 3261 - DNA, 179 bp, Homo sapiens
gtgaggcttcagtgagctacgattgtgccactgcactccagcctgggaaacagagcaagaccctgtctctgaaataaataaataaataartaaataaacaaataaataaataaattggaggccatttgttgaagattaaattatgtagagaacttcggaatcaggggaatctaggttcc

SEQ ID NO: 3262 - DNA, 179 bp, Homo sapiens
cttctgtctataaaatggggataataaaatagccacctctttggggttataaaatgaaatgatgcatggaaaggcttagcgaatatatayacatacacacacacacacacacacacacacacacacacacacacactggggacacattgctcaataaacactattttgtaaatatacat

SEQ ID NO: 3263 - DNA, 179 bp, Homo sapiens
ctcactaatgaccgaggacagccccgagtcttctaatcacctttaatgtgcactttagaagctgactttaaagcaggcgagataagcagrtcagacaaacagacaaagaaaacaaaataaaatcatataattgtctctaggcagctgattttggatgaggaggaggcgatgcgctggat

SEQ ID NO: 3264 - DNA, 179 bp, Homo sapiens
ggatcacttaagcccaggtggttgaggctgcagtgagccatgactacaccactgcactccagcctgggtgatagagcaagatcctgtctmaaaaaaaaaaaaaaaagaaaaaaaaaagtaaaaataaatctagttctttctctgcactcgccacgtgtatgtgtgcataaatgaataca

SEQ ID NO: 3265 - DNA, 179 bp, Homo sapiens
taaatacagtatatatgtatgtatatatatgtaaatgtgtatatatatatgaactcatgtatatacattcacatatatatgtacatatgrgtcagatcagaaattacatttatttttcttgttcatgtgtttcttcttcagtgatatatccccaccattctgtgagaatggttggaaat

SEQ ID NO: 3266 - DNA, 179 bp, Homo sapiens
gtggttgtgtagacataagtaggactcttctaaaatattaatgcaaaatgctggggagggaaggaaacaggaggcgttgggttagaagcrggagcctctgtaggctgcctgggctctcagaagagaaaggaatgggtggaggcactacagagccagccagcagctttgagggacattag

SEQ ID NO: 3267 - DNA, 179 bp, Homo sapiens
tcatattctgaaatactggggattagaacttcaaaatatgaattttgaggggtctcaaattagctcataagacatggtatttatatgtasataaaatttgtttcaaaatatggcaaaaatataagtcaatttaaaggaagaaacttttaataatacattcatatagcaaaattatgaaa

SEQ ID NO: 3268 - DNA, 179 bp, Homo sapiens
acacacagctagaaagctgcaaagctgggttttgaatgcaccagaatttatacactctcagtcagtgttctcaatcttttcattactgcrcttcctgaggattctttctacatgctcctaatgtcccaatcccatgaaattgtaatatgacagacacactgcgtatgtctctgtgcttg

SEQ ID NO: 3269 - DNA, 179 bp, Homo sapiens
aataaaagcaaatataaaatagacagaaaagtaaaactagatttgtccccttaaaaatatgtcaggattaggcaggacacagtggctcaygcccataatcccagcagtttgggaggccgaggtgggcagatcactggaggtcaggagttcaagaccagcctggttagcatggtgaaacc

SEQ ID NO: 3270 - DNA, 179 bp, Homo sapiens
ctgaggaaatacgtcttctttctccattggatcctggcttaaagaaaatatagttttaaaaagggttgcagaaaacagtttggaaaaaawatctagttttttaagatagaggataaaggacttttgaagtcactcagacctgaggtgcaaaacttatctttgctacttttctggctgtg

SEQ ID NO: 3271 - DNA, 179 bp, Homo sapiens
ttctaaagagagagttaacctcttcttctaatcaatatataagaaccatgtgtcacattaataaagctaatcatgtaattgcagatatawgtatacatacatacacatatatacatatgtatacatgcactcatatatatacctatgcacagtagatgcatacatatatgcatacattt

SEQ ID NO: 3272 - DNA, 179 bp, Homo sapiens; identical to SEQ ID NO: 2789

SEQ ID NO: 3273 - DNA, 179 bp, Homo sapiens
aaaaggaacagaggctcagagagtcccaacacaccatggctcatcagcagggagcgagtttttaaccccaagtctgtgagatcctggtgytcccaactagtatattttagtgcctctttgaaccatgacattggccatgaagaaagtggtagcatctcatcacatgttctagagaggcc

SEQ ID NO: 3274 - DNA, 179 bp, Homo sapiens
caacaggaagcctgagctttggacatctgcaggatatgggccatccttcatagacagaagtagccagggtgaaaaaccttacaatttagrggacacttgtcacatcaaccagcaacaagtatgggtagaattttgatcctagtttagatagtttgcaagattgtgacacctgaatttga

SEQ ID NO: 3275 - DNA, 179 bp, Homo sapiens
agattctagctctgttgcctaggctggagtgaagtggcacgatattgactcactgcaacctctgcctcctgggttcaagtgattctcctrtttcagcctcccgagtagctgggactacaggtgtgtgccacctcgcccagctaatttttgtatttttagtagagacatggtttcaccat

SEQ ID NO: 3276 - DNA, 179 bp, Homo sapiens
tcacagatctcaaacaccctatcccttcccttccaccagaggacttgacgccccacccaaagcacactccgacccacttcccacacggcrgccagaatgggaaatcagcctcaacccacataggaatcatgatgagtgcggctgacactcaccacgtgcttcatgtacaccaggcactg

SEQ ID NO: 3277 - DNA, 179 bp, Homo sapiens
taggaatcatgatgagtgcggctgacactcaccacgtgcttcatgtacaccaggcactggatgtgcatgtacacaggccctgcacataayatcctgtttgaagggcacaaaaatcccaagaggatggtattgctactcccgctttacaaaaagaaaaaggaacagaggctcagagagtc

SEQ ID NO: 3278 - DNA, 179 bp, Homo sapiens
cttcaactcagccaggcatggtggctcgcacctgtaatcccagaactttgggcggctgaggtgggggggatcacctgaggtcaagagttygagaccagcccggccaacgtggggaaaccctgtctactaaaaataaaaaattagctgggcatggtggcatgtgtctgtaatcccagcta

SEQ ID NO: 3279 - DNA, 179 bp, Homo sapiens
cccccagaggttacatcacacaggaagaagacaaacatgagcataaacaggaagattttatacttctcactgaatctctctcaccgtttscctcttgtctgccaggtaccaggtgccagaaaatctcccacctcccttgtcccagtaaaaggataaagcattcagtggcccctggtagc

SEQ ID NO: 3280 - DNA, 179 bp, Homo sapiens
attgactcactgcaacctctgcctcctgggttcaagtgattctcctgtttcagcctcccgagtagctgggactacaggtgtgtgccaccwcgcccagctaatttttgtatttttagtagagacatggtttcaccatgttggccaggctggtctcaagcttctgagctcaagtgatccac

SEQ ID NO: 3281 - DNA, 179 bp, Homo sapiens
attgtttttctgtcagtataatattctttacaaacatgctataaggcttcaactcagccaggcatggtggctcgcacctgtaatcccagmactttgggcggctgaggtgggggggatcacctgaggtcaagagtttgagaccagcccggccaacgtggggaaaccctgtctactaaaaa

SEQ ID NO: 3282 - DNA, 179 bp, Homo sapiens
gcctggttagcatggtgaaaccccatctctactaaaaatacaaaaaattagtcggcggtggtggcaggcacctgtaatcccagctactcrggaggctgaagcagaattgcttgaaccctggaggtgaagaaggttgcaatgaattgagatcgcacaactgtactccagcctggggcaac

SEQ ID NO: 3283 - DNA, 179 bp, Homo sapiens
cctcagcctcctgagtggctgggactacaggcacctgctaccatacccaactaattttttgtgttatttgtagagatgggatctccctgrgttgcccagactggtcttgaactcctggcctcaaacaatcctccagactcggcctcccaaagtgctgggatcgcagacataagctgcag

SEQ ID NO: 3284 - DNA, 179 bp, Homo sapiens
tgcccttgaacatcggactccaagttcttcagctttgggattcggactggcttccttgctcctcagcttgtggaaggtctattgtgaccytgtgatcgtgtgagttaatactccttaataaactcccctctatatatacatctatcctattagttctgtccctctagagaaccctgact

SEQ ID NO: 3285 - DNA, 179 bp, Homo sapiens
gccaaaggagattaatgtttgagtcagtggactgggagaggtagacccaacctcagtctaggtgggcaccatctaatcagctgccagtgsggccagaataaaagcagccagaagaacatggagagattagactagctcagcctccgagcctacatctttctcccatgctggatgcttcc

SEQ ID NO: 3286 - DNA, 179 bp, Homo sapiens
ggtagacacccagcagtggaattgctggatcatacggtcagtctatggatggttaatactgagtgtcaacttaattggattaaacggtgsaaagtgttgatcctgggtgtgtctgtgagggttttgccaaaggagattaatgtttgagtcagtggactgggagaggtagacccaacctc

SEQ ID NO: 3287 - DNA, 179 bp, Homo sapiens
ttttgggtagacacccagcagtggaattgctggatcatacggtcagtctatggatggttaatactgagtgtcaacttaattggattaaasggtgcaaagtgttgatcctgggtgtgtctgtgagggttttgccaaaggagattaatgtttgagtcagtggactgggagaggtagaccca

SEQ ID NO: 3288 - DNA, 179 bp, Homo sapiens
tttgagtccctgctttcaatttttttgggtagacacccagcagtggaattgctggatcatacggtcagtctatggatggttaatactgastgtcaacttaattggattaaacggtgcaaagtgttgatcctgggtgtgtctgtgagggttttgccaaaggagattaatgtttgagtcag

SEQ ID NO: 3289 - DNA, 179 bp, Homo sapiens
gcaatgtatccatgtaatgaaatagtatttggccttagaaaacaaggaaattctgacacgtgctaccacatggatgaactttgaggacaytacgctgagtgaaataagccagacataaagagacaaatactgtgtgattccacttataggtgggacctagagtcatcaaactcgtagag

SEQ ID NO: 3290 - DNA, 179 bp, Homo sapiens
cacgtgctaccacatggatgaactttgaggacactacgctgagtgaaataagccagacataaagagacaaatactgtgtgattccacttrtaggtgggacctagagtcatcaaactcgtagagatagaaggtagagtgctggttgctaggagatgggttggagagtggatgaaagctta

SEQ ID NO: 3291 - DNA, 179 bp, Homo sapiens
agtgtgaatgtatttaatgctactaaactgtatatacacctaaaatggttgagatgataaattttatattaaatgtgtcttacaacaatwtaaaaaaataaggtgaggggaaattaagcaatgggtcaatgaggtgtatgttttagattttgtgtgaacaaggccaaaaagattataat

SEQ ID NO: 3292 - DNA, 179 bp, Homo sapiens
tgcttctcatcacagtagataccttaattcagaatgatcctacagaagcagacatccctaccagattgctattgctgtgaatgcaactcsgaaggggactggaccacaggcagctggactttacataagttacaacaggaatttctgtccaatggataagcttggcctttatgacatac

SEQ ID NO: 3293 - DNA, 179 bp, Homo sapiens
actcagcttagcctcacccctgtctttgatagtactgtttcccttctggtcctcctctgcacctatacaaatcctatttattcttggagrtgccactcaagttcttctccctcttcctcatcctatcttttcctatttctcttcctagaaataaaacccaaatattccagccctcccca

SEQ ID NO: 3294 - DNA, 179 bp, Homo sapiens
ttcataataatatacaatgtatttattcagatgacttctatagaatggtagtcaatctcaatatcaccccaattatgtggtgttttgctkggcaagtgatttcaccgtttcaaaggacgtgttgctgggttgtgggctcaaatcctgattccctttctccccagttttgtcactttagg

SEQ ID NO: 3295 - DNA, 179 bp, Homo sapiens
gatggggtcttgctgtgttgcccaggttggtcttaagttcctggcttcaagagatgctcctgccttggcctcccatagtgctgggattaytgacatgagccactgtgcctggcagatgtcgccagttggttcctccacttgtcctagatttggctaatgggaattgcttcaggttggct

SEQ ID NO: 3296 - DNA, 179 bp, Homo sapiens
ttcaaatatgttgcctttttcctatcttcagcctttaagatagtgcaaatctttctattttctccctacctccagctttaagtcccttcyagtgattgccaaaatctgaagcccaaaagtggggataggaagaaagcttgacccaaaagtgtccttggatgttgtgaatacaatgcgtt

SEQ ID NO: 3297 - DNA, 179 bp, Homo sapiens
aaagtgtccttggatgttgtgaatacaatgcgttcataatttttcttgtcacactgtatcacacactagttctagcttttatgtctcatsatcctccaccagaatgtataaaatttaaaaaagactgtcagtactaacaactggtaaggctgtagagcaataggacacaatgcttttgg

SEQ ID NO: 3298 - DNA, 179 bp, Homo sapiens
gtataaaatttaaaaaagactgtcagtactaacaactggtaaggctgtagagcaataggacacaatgcttttgggaatgtgaattggcartatcactttggaaaactgcttggcagtatctgataatactgaacacatgtatgttcccatgacccagaaatttcactcttaaaggcata

SEQ ID NO: 3299 - DNA, 179 bp, Homo sapiens
ggcagtatcactttggaaaactgcttggcagtatctgataatactgaacacatgtatgttcccatgacccagaaatttcactcttaaagrcatactccccctagaatgagtgcttatgtgcaccaaaagacatgcataagaatattttaagcagatttatttgctacaactcgaagctg

SEQ ID NO: 3300 - DNA, 179 bp, Homo sapiens
ttggaaaactgcttggcagtatctgataatactgaacacatgtatgttcccatgacccagaaatttcactcttaaaggcatactcccccyagaatgagtgcttatgtgcaccaaaagacatgcataagaatattttaagcagatttatttgctacaactcgaagctgggaaacaaaaca

SEQ ID NO: 3301 - DNA, 179 bp, Homo sapiens
cttttgggaatgtgaattggcagtatcactttggaaaactgcttggcagtatctgataatactgaacacatgtatgttcccatgacccasaaatttcactcttaaaggcatactccccctagaatgagtgcttatgtgcaccaaaagacatgcataagaatattttaagcagatttatt

SEQ ID NO: 3302 - DNA, 179 bp, Homo sapiens
agaatattttaagcagatttatttgctacaactcgaagctgggaaacaaaacaaaacaaatgtccattgagaacagaaaggataaatgcrgtatgctcatgaaatggaatactatacagtcatgaaaaagaacaaactggagccacgtgcaataagttagattaattcacagacatgac

SEQ ID NO: 3303 - DNA, 179 bp, Homo sapiens
gatttatttgctacaactcgaagctgggaaacaaaacaaaacaaatgtccattgagaacagaaaggataaatgcggtatgctcatgaaawggaatactatacagtcatgaaaaagaacaaactggagccacgtgcaataagttagattaattcacagacatgactgaaagaaaccagac

SEQ ID NO: 3304 - DNA, 179 bp, Homo sapiens
ctctcatgtagggactgatataacagttgaaaatataaccattaagaaatgtcaaaactactcttagctctctggccatccccaaaacargcagaaggcagaatttagatttgactcactgcccagagcttctgacctaacgtggaggtagttagttagaaaaatgtttgttgacttaa

SEQ ID NO: 3305 - DNA, 179 bp, Homo sapiens
gcagttacccttatgctagtatagtgatagtgaatgagttatcatgagatctggtggttttataaggggcttccccacccttcactctcrttcttctccttcctgccatcatgtgaagaaggacgtgtttgcttccccttctgccatgatggcttcccaagccatcctgaactgtgagc

SEQ ID NO: 3306 - DNA, 179 bp, Homo sapiens
gggagagaatttactggcaggacggggcgtgatggctcacgcctgtaatcccaacactttaggaggttgaggtgggaggatttcttgagyccaggaattccagaccagccctggcaatataggaagacctcatctctttttaaaaaaaattttttttaaattttggtgcatgcctgtca

SEQ ID NO: 3307 - DNA, 179 bp, Homo sapiens
gcgtgatggctcacgcctgtaatcccaacactttaggaggttgaggtgggaggatttcttgagcccaggaattccagaccagccctggcratataggaagacctcatctctttttaaaaaaaattttttttaaattttggtgcatgcctgtcatcccagttacttgggaagctgaggtg

SEQ ID NO: 3308 - DNA, 179 bp, Homo sapiens
aaaaaaaattttttttaaattttggtgcatgcctgtcatcccagttacttgggaagctgaggtggaggattgctttagtctaagaggtcrgggctgcagtgagctatgatcacaccactgcactctagcctgggtgacagagcacaagaccctgtctcaaaaaataaaaataaagaaat

SEQ ID NO: 3309 - DNA, 179 bp, Homo sapiens
tcaaaaaataaaaataaagaaatatgtatgtgtttactatgtgacaggaactgtttgtaaataaaggactttctaagagacaatcagaakggggacactttccagcctggctcagcatctccaaaatgcaaatgaagatattactctccctcgtgaatttcagagataccctccctgct

SEQ ID NO: 3310 - DNA, 179 bp, Homo sapiens
catcccagttacttgggaagctgaggtggaggattgctttagtctaagaggtcggggctgcagtgagctatgatcacaccactgcactcyagcctgggtgacagagcacaagaccctgtctcaaaaaataaaaataaagaaatatgtatgtgtttactatgtgacaggaactgtttgta

SEQ ID NO: 3311 - DNA, 179 bp, Homo sapiens
atggagcaaagcaacaaatttcaacatcacagggtggagagggcagggagaatcacaaagctgttgaaactgaagttctcaatgcgtgcratttatggctgagcagctatctcagtctgtagcatcaaagccttaggtgagagcagaggtgacagggacacccaatgcctcggtggcca

SEQ ID NO: 3312 - DNA, 179 bp, Homo sapiens
tgtggtggcaagtgcccgtagtcccagctacttgggaggctgaggcaggagaatagcttgaacctgggaggtggaggttgcagtgagccsagatcgcgccactgcactccagcctgggcaacagagtgagactctgtctcaaaaaaaaaaaaaaaaaaaggaacatatctcaaaataat

SEQ ID NO: 3313 - DNA, 179 bp, Homo sapiens
ggccagtgaattggagcacagtgacaataaaggaaaggcaagcacagagaaatacgcctctcctgctactgaagattatcagcagtgagmcatcagtttgaccctctgtccatcctagttccccagacaaagagggaggtgctctggctcctgagctgtggtttggcgaccgccgtatg

SEQ ID NO: 3314 - DNA, 179 bp, Homo sapiens
ccttctctgccagctgctagaggaaatgtctccgctatgaatagtaggaattgtgtttaatatttgcgagatttgcttcaaaatcatgtrgataggccgggcgcggtggctcatgcctgtaatcccagcactttgggaggccgaggcgggcggatcacaaggtcaggagatcgagacca

SEQ ID NO: 3315 - DNA, 179 bp, Homo sapiens
gaaatgtctccgctatgaatagtaggaattgtgtttaatatttgcgagatttgcttcaaaatcatgtggataggccgggcgcggtggctyatgcctgtaatcccagcactttgggaggccgaggcgggcggatcacaaggtcaggagatcgagaccatcctggctaacatggggaaacc

SEQ ID NO: 3316 - DNA, 179 bp, Homo sapiens
agaaattggccttcagatgagacccatctctcactggtggattgaaacagcttcccaaccagtctctctgctcccctatagtctagcacrtcggataaagtgttatcctcttaagacaaatcagatcacatctctccctggatggaaactttccagtggcttcccgttgcacttacaat

SEQ ID NO: 3317 - DNA, 179 bp, Homo sapiens
ctcagtaatttattgagaaccgataatgcaagtccctataaagtttttaatctgcacaaacagaatcatgttaatgtgttcacttgtccsgattttttttttgaaagattttgtttttgtttccacttgacacagtgaaggaaaaatatatatataaatccgcactgagggagatgtct

SEQ ID NO: 3318 - DNA, 179 bp, Homo sapiens
ccatctctactaaaaatagaaaaaattagccgggcatggtggcaggcacctataatcccagctactcaagaggctgaggcaggagaatcrcttgaacccagaaggcagaggttgcagtgagtcgagattgcgccactgcaccactccagcctgggtgacagagcaataatctgcctcaa

SEQ ID NO: 3319 - DNA, 179 bp, Homo sapiens
gctttatagagcgtaacataacaatggctaccacagtcattattattcacataaaatccattttgcaacagtataattattggtgtcaayagcaatgcccacgcggatttttaggtagcattgatgtgacttagtgccagatcaaagagtaagaaatatttgagtgaaagattactacc

SEQ ID NO: 3320 - DNA, 179 bp, Homo sapiens
ctgtgttactccaagtttcagacagggtcttgctgttgtccaggctggagtgcaatggcatgatcatagcttaggacggcctcaagcccrggctcaagtgatcttccttctttagcctcccgagtagctgggactacaggtgcacgccaccacacccggctaagtgtttatccttaaca

SEQ ID NO: 3321 - DNA, 179 bp, Homo sapiens
tttgaatgtcaaagatgaccacatattagcatttttctgtaatttaacctgtcaactgtcagctaaagggcaccccaatccatgaggtcrctggaggtagctagaatgaggatggaagtgaaaacaaaacaaagcaaaccaaagagaaacatcctgggccctgggtccacctatcttcc

SEQ ID NO: 3322 - DNA, 179 bp, Homo sapiens
tctttataactgcaaaactgatttcttacagatagggaagaagagaacaaatcagttggaagaaacagaatgagcaaagtcaagaagacrtaaaagcaaggtgcatctgactttacaattcaatagaataaaaaacacaacaatgacgaaaatggtgtaaaatctgttcattataaagt

SEQ ID NO: 3323 - DNA, 179 bp, Homo sapiens
ggactatttatagaaaggtggacatggctgaagaaaccaacaagggatgcttaagcactctggggccagcaatagaggaagcaggggccrgaactggggtgtatggagcccagcaagggctggaactgtgggggacggggctgtcccgcatgagctgtggtcatggagcctcacagcca

SEQ ID NO: 3324 - DNA, 179 bp, Homo sapiens
aggcacccagtaggtgccaaattaatgcttgttgaatgaatgaagattatcattcaagagacttcacaggcaacccataaccttaaactycttgaaagaagaacctctttactttttatctctaaccaaaaccctacttactagagtagatgcccaattaatgcgtcttgaactgaacc

SEQ ID NO: 3325 - DNA, 179 bp, Homo sapiens
ctatctatctaatctatctgtctgtctgtctgtctgtctgtctgcctgtctgtccgtccgtccgtccatccatccatccatccatctatwtctatctatctatctatctatctatctatctatctatctatctatctatctaatctatctgtctgtctgtctgtctgtctatccatcca

SEQ ID NO: 3326 - DNA, 179 bp, Homo sapiens
tgtcaatcaagaagaacacccaatattgtgggatctacatttgagcatccactgtgggccaggagcctgaagttagttcactattaaggktattagagatagagaaagatacttggagacaagagcttgtctggtacacgcagctctttgttgtgtcttggatttaataggaatcaaga

SEQ ID NO: 3327 - DNA, 179 bp, Homo sapiens
caggtgacccacaccagccaacagctctctctcacacatagtccacagtgggttcacaggatacactcagaatccttggctccaatgaartctgcaggtgaagatctttcctaaggcaaccacttctgtttcagctgagataacccatctatttttttgtctcctatttctcatatggg

SEQ ID NO: 3328 - DNA, 179 bp, Homo sapiens
gcttcccctttcattccaacctgtccctggtgagttaaactcttttctatgttcccaagaccctcgattttatttctctttgtgcatacrgcatattgccttaggcttccatttttaaatttgtgactaccctactagactgtgagttcttctagggccactgaccacactggattcat

SEQ ID NO: 3329 - DNA, 179 bp, Homo sapiens
acccccaaactatcaaggccaagacttagccaggccagaggggcattcgaaatgatcaaatccaattctcctgctttgcagaggggatgygggaggtgagcattgcacatgttcgcctctgtggggacggctcctggagcatctccttgtgatcactgtgccgggtacttctctaatca

SEQ ID NO: 3330 - DNA, 179 bp, Homo sapiens
taaccctaagattttattttttctttctgattgtaaaaaatttaaaacactatggtgagcccctaaaagtagtgggtaagttggccccaytctccatggaaggtaagccccatgagggcaggaatcccatctgcctactctctctccttggaatcccttcctactttttctccttgaaa

SEQ ID NO: 3331 - DNA, 179 bp, Homo sapiens
aaatactttgtgcaaatatttttccccattttgtaggttattgttttactttcttgatgtccttggatgcagaaaagttttttttttttwttttgcggaagtctggtttatttatttttctgtcttagtcatgcttttgatgtcttatcttagaagccattgccaaatccaaggttatg

SEQ ID NO: 3332 - DNA, 179 bp, Homo sapiens
tgtccaaaattataataattgttggccgggcgcagtggctcatgcctgcaatcccagcactttggaaagccaaggcagccagatcacttraggccaggagttcgagaccagcctagccaacatggcgaaaccccatctctactaaaaaagccaggcgtggtggcacatgcctgtgattc

SEQ ID NO: 3333 - DNA, 179 bp, Homo sapiens
aaatgaaaggggcaggactggcttctaaagaaagaagaaatttatagactcctagtcacaccatgacaaagactatttccgtaggtagtkagtggcttatgcctggaggaatttaagctaacaatggataaacactgagcaagggatgctgtggggtagattcctgtatcagatgagta

SEQ ID NO: 3334 - DNA, 179 bp, Homo sapiens
caggaaatctccttgcacctgttaaatggggatacagattcagtttaccccacagaggtaaccaaggggaagccggaggacataaattaktaggaataattttttaaatctttcttcttccccaacccccatcctcccaccccaatcctagaagtttctccaaacaaaacaaaacaaaa

SEQ ID NO: 3335 - DNA, 179 bp, Homo sapiens
ctaacctgggcgacagagtgagattctgtcaagaagaaagaaagaaagagaaagaaagaaagaaagaaaggaaagaaagaaagaaagaargaaggaaggaaggaaggaaggaaggaaggaaggaaggaaggaaggaaagaaagagggagggagggagggaaggaaggaaggaaggaaag

SEQ ID NO: 3336 - DNA, 179 bp, Homo sapiens
cattagcacgtttgttttcaaaatggggacaaggtccctggagctaagatcagtagctgccatggtctgaagctagtttcagaaaaatgycagttggtgcttagctcgttggatttggtatactaaagcctttgactaatggaccaccttgtattttgctaaaacagcacctgttttgg

SEQ ID NO: 3337 - DNA, 179 bp, Homo sapiens
ctgcagggtgacagttgaggcccttaacagttacacaactgtgaggggttccaggcatgtagacctccctttctttcctacccctgagtytaaagtgaagtcagtatgccattcatcacatcagatcagggactgagataagtactgtcatctgccttaccttctcccagatgggtcct

SEQ ID NO: 3338 - DNA, 179 bp, Homo sapiens
ggccttgaagtcttccacaggtctccaactgagattcactcactgggttctgcacatggctagcagcccttcatgggcaggtgtagtgamggaagggaatggtcagttatattcaaccctccacactcacctgttccttagatccagggaggtctgcattgtcaccgagatgtccaggc

SEQ ID NO: 3339 - DNA, 179 bp, Homo sapiens
tctgatggccgccttccctcagtgtcctcacatgccaggcagggagggttagagtgggggatgatctctccctctctctctctctctctmtctctctatctatctatcttcctcttttttatatggccaccatcctgtgagattaaagccccacacttatgacctcatttaaccttttt

SEQ ID NO: 3340 - DNA, 179 bp, Homo sapiens
attaacactggtgggtactaagactgcttaagataggaaaggggaagagaatgatgtgttttgtaatgtgaaagcaaatagattatgcaygcatcccaggaaaaggagatgcttcaggaaattcttatgaaggtattagaatttccctggtgatcaataatgtagaatattttttcata

SEQ ID NO: 3341 - DNA, 179 bp, Homo sapiens
tagatatttcatcagggctctgagtagcagggaaagggaggacctgaagattcggggcaatcattgctaattcaagagctagggctgacmacgctagctcaaaactttgagcaagaaatttcccctagacaggcctcagtttcccctatttgtataaagaagggtatgtccaaagggta

SEQ ID NO: 3342 - DNA, 179 bp, Homo sapiens
tttgatgattcttgcctgaatcaatgatgatgatgatgtttcctaaatgcagttttctaactccagtcttttttctacatttattagttrgctttctagtgtaaagaagaaaattccttacttttaaatttacatatgtcagcataggctcatgaactcttattcaatagataatcctc

SEQ ID NO: 3343 - DNA, 179 bp, Homo sapiens
atagccatacagctggccagagacagagccagaactcaaactcagatctgtccagctccaacgtctacattcttccagctccaccaaatkcttggttgagcttgccggggagaaactgtgtagcaaggtaacttttggaggatttgagagcctccagccagcccagctaggccaaactt

SEQ ID NO: 3344 - DNA, 179 bp, Homo sapiens
gcttcagtgagctgtcattgtgccactgcactccagcctgggtgtcagagcgagaccctgtgtccacaaaaaaaaaaaaaaaaaaaaaaragagagaataaagatatgaaacaaagaaaattctatacacagcagcaaatcaacaaagataggatagagaagaaaataaagttgggttg

SEQ ID NO: 3345 - DNA, 179 bp, Homo sapiens
cataccctccagggaagtgtcccgggggatggccagatcagcctgtcctttgtggcaggaggtggggattctgacggttgttttcacagytcgggaggacaggcagctctcacctctgtttgccctccctggccagtgcagccagctcctgagtctcgtggttaactaaggtctcagac

SEQ ID NO: 3346 - DNA, 179 bp, Homo sapiens
ccaccctgactccctccaggttaccagctcctatctccaccctgactccctccaggttaccggctcctatctccaccctgactccctccrggttaccggctcctatctccaccctgactccctccaggttaccggctcctttctccaccctgactccctctgggttactggctcctatc

SEQ ID NO: 3347 - DNA, 179 bp, Homo sapiens
gaaatacacacacacaccagcaaataattgtacatctctctgaatggttagtcactttaaagtcatctacatcagtcattctcaaccaayacccttttgccccctaggggatatttgaccatgtgtggagatattcttagttatcacaacttggaggtggtggcatgctattggtatct

SEQ ID NO: 3348 - DNA, 179 bp, Homo sapiens
gcatatatgtgtataaacctaacgtacatgaacatatataggtatgtgtgcatatatacaatccatcctaaattttgttttatttttgaratgggggtcttgctatatcacccaggctggtctcaggctcctggactcaagagatcctcctgcctcagcttctcaagtagctgggacta

SEQ ID NO: 3349 - DNA, 179 bp, Homo sapiens
ggctgaagttacaacagtcaccaaaacagacaaatatttctgccctcaagaagctcatattctaatgtcataccaattaccaatgcatargaggcctacacaactggatatcaactgcatcatgctttctctcaagtgtcattctggaaagaaccatgcataaagatctttgcaatgga

SEQ ID NO: 3350 - DNA, 179 bp, Homo sapiens
tgctgaggatctaatgtgagaaccagaagtggtgtttgcatgagtttatgagatccgcctcattgtgacatgaggaaaccgaggcacaargaggagaaatgacttgttcaagttcacactgctagtgaatgatgtgcctgggattcaacccaggtctcctataccaaagctgcagcttt

SEQ ID NO: 3351 - DNA, 179 bp, Homo sapiens
ctgattgtgccactgcactccagcctgagtgacagagtgagaccctgtctcaaaaaaaaaaaaaaaaaaaaaaaaaataataataataawaataatcaaacgaataaggttttaaaagaagaattatgagtgctgctaaaattacataacaaggtgatatagtaatgagagtcataggg

SEQ ID NO: 3352 - DNA, 179 bp, Homo sapiens
tatatatatatacagttattttgtttaaatcaggatccacatgagtttcacacattgcctttggttggatctcttaaattgcctctactytttatatttctatgttttctttaattaattaatatagagatggggattcgccatgttccccaggctggtcttgaactcctgggctcaag

SEQ ID NO: 3353 - DNA, 179 bp, Homo sapiens; identical to SEQ ID NO: 2731

SEQ ID NO: 3354 - DNA, 179 bp, Homo sapiens; identical to SEQ ID NO: 2761

SEQ ID NO: 3355 - DNA, 179 bp, Homo sapiens; identical to SEQ ID NO: 2765

SEQ ID NO: 3356 - DNA, 179 bp, Homo sapiens; identical to SEQ ID NO: 2730

SEQ ID NO: 3357 - DNA, 179 bp, Homo sapiens; identical to SEQ ID NO: 2737

SEQ ID NO: 3358 - DNA, 179 bp, Homo sapiens; identical to SEQ ID NO: 2771

SEQ ID NO: 3359 - DNA, 179 bp, Homo sapiens; identical to SEQ ID NO: 2806

SEQ ID NO: 3360 - DNA, 179 bp, Homo sapiens; identical to SEQ ID NO: 2781

SEQ ID NO: 3361 - DNA, 179 bp, Homo sapiens; identical to SEQ ID NO: 2780

SEQ ID NO: 3362 - DNA, 179 bp, Homo sapiens; identical to SEQ ID NO: 2779

SEQ ID NO: 3363 - DNA, 179 bp, Homo sapiens; identical to SEQ ID NO: 2805

SEQ ID NO: 3364 - DNA, 179 bp, Homo sapiens; identical to SEQ ID NO: 2733

SEQ ID NO: 3365 - DNA, 179 bp, Homo sapiens
gaaacatcacatggcagaggtaggtgcttttcttagtcaaggggaaacgtgaatttaggtttcagggatggtttacttgaagggaatccygcaagtacatattttgaaatatacttgcctcagacctccccccaaataagggactgggtcccattaagaaaattgaaagaaaaaaatat

SEQ ID NO: 3366 - DNA, 179 bp, Homo sapiens; identical to SEQ ID NO: 3180

SEQ ID NO: 3367 - DNA, 179 bp, Homo sapiens; identical to SEQ ID NO: 2817

SEQ ID NO: 3368 - DNA, 179 bp, Homo sapiens; identical to SEQ ID NO: 2839

SEQ ID NO: 3369 - DNA, 179 bp, Homo sapiens; identical to SEQ ID NO: 3135

SEQ ID NO: 3370 - DNA, 179 bp, Homo sapiens; identical to SEQ ID NO: 2746

SEQ ID NO: 3371 - DNA, 179 bp, Homo sapiens; identical to SEQ ID NO: 2789

SEQ ID NO: 3372 - DNA, 179 bp, Homo sapiens; identical to SEQ ID NO: 2727

SEQ ID NO: 3373 - DNA, 179 bp, Homo sapiens; identical to SEQ ID NO: 2896

SEQ ID NO: 3374 - DNA, 179 bp, Homo sapiens; identical to SEQ ID NO: 2848

SEQ ID NO: 3375 - DNA, 179 bp, Homo sapiens; identical to SEQ ID NO: 2894

SEQ ID NO: 3376 - DNA, 179 bp, Homo sapiens
ctccaaccctgaatgtggggcaaccggggagaaagccagccctcctttgctatggtgctcactccaccttccaggtttgtttgcaaacakatattttccctttgcccaggcgatgtatttatttgtgaaaacaccctcaccctccaagtcagcttggaggcctttaggcttgctggcaa

SEQ ID NO: 3377 - DNA, 179 bp, Homo sapiens; identical to SEQ ID NO: 2856

SEQ ID NO: 3378 - DNA, 179 bp, Homo sapiens; identical to SEQ ID NO: 3184

SEQ ID NO: 3379 - DNA, 179 bp, Homo sapiens
gctttgtgtgaagaagggccaggagacaggagaagatgcaagggtaggaagcggtcacttcattcattgcctaactcaaggaagccactyagacgagacaactagctccatttaggggcttctgtaagtggcgtgactgagggttgggggtctatttatttgagaagacaggtaataat

SEQ ID NO: 3380 - DNA, 179 bp, Homo sapiens; identical to SEQ ID NO: 3142

SEQ ID NO: 3381 - DNA, 179 bp, Homo sapiens
tctttgtttctttgtttctttctttctttctgtctgtctgtctttctgtctttctttctctctctctttccttccttccttctttctttyttttttttttttttttttttttttgacagagtcttgctctgttgcccaggctggggtggtgcagtagcacaatctcgactcattgcaac

SEQ ID NO: 3382 - DNA, 179 bp, Homo sapiens; identical to SEQ ID NO: 2995

SEQ ID NO: 3383 - DNA, 179 bp, Homo sapiens; identical to SEQ ID NO: 3351

SEQ ID NO: 3384 - DNA, 179 bp, Homo sapiens; identical to SEQ ID NO: 3200

SEQ ID NO: 3385 - DNA, 179 bp, Homo sapiens
agcccccatgcctttttaatttattgcctaaagaggcagggttagaatgttgcagaggatttcttgcgtgtagctgatctgagattttcmaagttccaagaaggggtcaagcggcagctacaggacattttccaaaatgcaacaacctatgtgtttctgtcctggaagcaaaagaggca

SEQ ID NO: 3386 - DNA, 179 bp, Homo sapiens; identical to SEQ ID NO: 2980

SEQ ID NO: 3387 - DNA, 179 bp, Homo sapiens; identical to SEQ ID NO: 2987

SEQ ID NO: 3388 - DNA, 179 bp, Homo sapiens
tattagtcatgtggataagaatagctaatattctactctaaggatcgtcaaatgctttctgtaaaggaccagatggtagatatttttggytttttgggccagagtggctctgtcccaactactcaactctgccaaggtcatgtgaagtcagccatagacaatacataaacaaatgtgta

SEQ ID NO: 3389 - DNA, 179 bp, Homo sapiens; identical to SEQ ID NO: 2979

SEQ ID NO: 3390 - DNA, 179 bp, Homo sapiens; identical to SEQ ID NO: 2930

SEQ ID NO: 3391 - DNA, 179 bp, Homo sapiens
tgcaccaacatgctcagctagtttttaaaattttctgtagaggtgaggtctcactacattgcccaggctgttgttgaactcgtgggctcractgatcctcctggcttgggctcccaaagtgttgagattacaggtgtgagccactgtgcctggctcatcccaactttttacaagtccct

SEQ ID NO: 3392 - DNA, 179 bp, Homo sapiens; identical to SEQ ID NO: 2932

SEQ ID NO: 3393 - DNA, 179 bp, Homo sapiens
aaggacatgctgccagctagcccagcacccatctacaaagtgaaatggattagcggctcactttcaatcaggctgagttacgagctcagygatttgtgggacgtttacatgaaccagaagatgtgttatctgatgaaaattgcttaatttaatatcctggcttgacaggcaaagaactg

SEQ ID NO: 3394 - DNA, 179 bp, Homo sapiens
gtgaccctctggcctttgtccccgctgtctttcctagcaggaaaactgtcgggaattcaacctctgtcaaaaaataaaaacaaaaaacargaacaaacacccaaaccccaacaacaaagagagaacgcggactccagacagttttctcctttcaactctagaactttcccggaaacata

SEQ ID NO: 3395 - DNA, 179 bp, Homo sapiens
agggttaattctaccttttctagagagttcctagaggaagggatactcacagggttttgaaggaggagttggagtcagatcccaccaggmaattgagtatgattctatcataaagctgtatagtaggcagagcctgtgtcatgagggtgcttgtaggctattggaggagtttggatatt

SEQ ID NO: 3396 - DNA, 179 bp, Homo sapiens
tggccgggcatggtggctcatgcctgtgattccagcactttgagaggccaaggtgggcagatcacttgagtcctggagtttgagaccagyctgggcaacatggtgaaactccttctctataaaaaatagaagaattagccaggcatggtggtgtgggcctgtagttctagctactcggg

SEQ ID NO: 3397 - DNA, 179 bp, Homo sapiens
aatgttttttccaactcaggggttacactgcctaacattctaccagcaagaaatgaataactttggcttaagcattactctcttcctccycagtcttcatttatggggaaagaacagctggccctataaaaataattggagctacaatttatgttgactaggtttcaacttctaaattc

SEQ ID NO: 3398 - DNA, 179 bp, Homo sapiens; identical to SEQ ID NO: 2929

SEQ ID NO: 3399 - DNA, 179 bp, Homo sapiens; identical to SEQ ID NO: 2948

SEQ ID NO: 3400 - DNA, 179 bp, Homo sapiens
gctcagtgaccttgagcaaatcactcacaccctgtgtgaagtggaggaatggcctagccacctccatgggagttcaaggctctgtaaacyttaaagcatgatcctaaatcaccagaattctgtgttctagaaaactcttcctcctccaaggtaaagaatcagcatattttatttgaaag

SEQ ID NO: 3401 - DNA, 179 bp, Homo sapiens; identical to SEQ ID NO: 2949

SEQ ID NO: 3402 - DNA, 179 bp, Homo sapiens; identical to SEQ ID NO: 2954

SEQ ID NO: 3403 - DNA, 179 bp, Homo sapiens
ttttctatttttggtagagacggggtttcaccatgttggctaggctggtcttgaactcctgacctcaggtgatccacctgcctcagcttyccaaagtgctgggattacaggcgtgagccaccatgcccagccccaggaattccttcttaagcatccttaacaaacagttaaccttgaca

SEQ ID NO: 3404 - DNA, 179 bp, Homo sapiens; identical to SEQ ID NO: 2958

SEQ ID NO: 3405 - DNA, 179 bp, Homo sapiens; identical to SEQ ID NO: 2981

SEQ ID NO: 3406 - DNA, 179 bp, Homo sapiens
gtttatccactcatcagctgacagacatctgtttttgtgtgaacgtgagttgtcatttctctgttgttgatgcccaagagtgcaatcacygggtcatagagaaagtgcacgttttactttgtaagaaactgcccacacttggaatttcccagagcagctgtaccatttttggctcccat

SEQ ID NO: 3407 - DNA, 179 bp, Homo sapiens; identical to SEQ ID NO: 2970

SEQ ID NO: 3408 - DNA, 179 bp, Homo sapiens
ctgtggggcagctgtgtggccattttacatacaggaaaaatgagtctctggctgcttaaggtatttaccaaaatgtacaaagctattaartggtgagacaggtctcacaccaaagcctgatgaaaccccaaagcctatgctctccttacctgttgcctcacagtagacggggtagatct

SEQ ID NO: 3409 - DNA, 179 bp, Homo sapiens
aacatctgagcttctcaagaaagccaggcctactgtcaaccaggagatgacagccaagacacctctgcagaagatgcaagcggcgaagcyacggtgcggaccgttcgacagaaagcgttggaggcctcccagggacatgtcaggggacagggagcacgggagcgagtgattcatgccgc

SEQ ID NO: 3410 - DNA, 179 bp, Homo sapiens
gtttgtgaccagcctgggcaacatggtgaaaccccgtctgtaccaaaaatacaaaaataagctgggtgtggtggtgtgtgcctgtgttcycagataccgtaggggctgaggtaggaggaatgcttgagcccaggaggttagagctacagtgagctgagatcgtgccactgcactacagc

SEQ ID NO: 3411 - DNA, 179 bp, Homo sapiens; identical to SEQ ID NO: 2969

SEQ ID NO: 3412 - DNA, 179 bp, Homo sapiens; identical to SEQ ID NO: 2968

SEQ ID NO: 3413 - DNA, 179 bp, Homo sapiens
gttggggcgaagctgcgcagggccaccagggactggggaggaagaaaatcacagggcacccaggaactcctccctgagcccaactctgcygctcggggggaaggagatgcacaccacactccccactgtgcagataatagaaaccacaaagtagcaattactgtatcagaagctgtgaa

SEQ ID NO: 3414 - DNA, 179 bp, Homo sapiens; identical to SEQ ID NO: 2862

SEQ ID NO: 3415 - DNA, 179 bp, Homo sapiens; identical to SEQ ID NO: 2863

SEQ ID NO: 3416 - DNA, 179 bp, Homo sapiens; identical to SEQ ID NO: 2861

SEQ ID NO: 3417 - DNA, 179 bp, Homo sapiens
ggatcccatcccaggcagctgaagggccttgggggaggtcacagctgtggttgggggtttccaggcagacatcagcatgacaaatgaaaygccacccacaaagactctagaagcttcagaaatcctattattcttcagagtcagagaaatggctacagtgagcaggtttctttcctcct

SEQ ID NO: 3418 - DNA, 179 bp, Homo sapiens
ccctgttttaagaggagagaagtgaagtctccaagaagcttcagccctttccaaggtcacacagttcctaagcaaatgggaggcatgagrggggagggggacagacatatctgactctgaaattcactctttttttgtaagaaattatagaagacttgtttttagtttcttttccaaaa

SEQ ID NO: 3419 - DNA, 179 bp, Homo sapiens
gctctctttctgctgcacaatgactcaacccgcttgcatcatctggacggggactggccacttgcaagagctggggcctctttcttccckagtctcggccaggtctgaggtgaagcaggaaggccccatacggggtggctaggaatgccctgtgtggactcccaggggtccagtgactt

SEQ ID NO: 3420 - DNA, 179 bp, Homo sapiens; identical to SEQ ID NO: 3027

SEQ ID NO: 3421 - DNA, 179 bp, Homo sapiens; identical to SEQ ID NO: 3030

SEQ ID NO: 3422 - DNA, 179 bp, Homo sapiens; identical to SEQ ID NO: 3125

SEQ ID NO: 3423 - DNA, 179 bp, Homo sapiens
attttctgagtgctgtcttaggattcctttatgaaactggagagaaggagcgaggaattaggtggagctccatttcctaaggacgggggrgggggggagttaagaaattagccttgccaaggacttcatgactaaaacaccaaaagcaatggtaacgaaagccaaaattgacaaatggg

SEQ ID NO: 3424 - DNA, 179 bp, Homo sapiens; identical to SEQ ID NO: 3003

SEQ ID NO: 3425 - DNA, 179 bp, Homo sapiens
tttcttatttatttatataaaatatattatatatttcttttttttttaaattttgttagtatttattgatcatttttgggtgtttctccragagggggatttggcagggtcataggacaatagtggagggaaggtcagcagataaacatgtgaacaaaggtctctggttttcccaggca

SEQ ID NO: 3426 - DNA, 179 bp, Homo sapiens; identical to SEQ ID NO: 3004

SEQ ID NO: 3427 - DNA, 179 bp, Homo sapiens; identical to SEQ ID NO: 3006

SEQ ID NO: 3428 - DNA, 179 bp, Homo sapiens; identical to SEQ ID NO: 3007

SEQ ID NO: 3429 - DNA, 179 bp, Homo sapiens; identical to SEQ ID NO: 3008

SEQ ID NO: 3430 - DNA, 179 bp, Homo sapiens
catcagcacaaggctatggagtgatcacccaccatcagggtgctccggaatgtcactgaggaggaccggaataagaaaaaaccaaccaamcaaacaaaccaaaaaaaaaaaaccagagccaatttcaatccacttcacctgagatgggtgggggggatagataaaaaacctaatttaga

SEQ ID NO: 3431 - DNA, 179 bp, Homo sapiens; identical to SEQ ID NO: 3011

SEQ ID NO: 3432 - DNA, 179 bp, Homo sapiens; identical to SEQ ID NO: 3012

SEQ ID NO: 3433 - DNA, 179 bp, Homo sapiens
aactgccctcccttcccccagcaccatctctacaacaagagaaaaaaattagatgagtgttgtggtatgcacctgtagtcccagctactygggaggcagaggtgagaggattgcctgagcccaggaagtcgagactacagtgagccatgtttgtgcccctgcactccagcctgggcaac

SEQ ID NO: 3434 - DNA, 179 bp, Homo sapiens; identical to SEQ ID NO: 3133

SEQ ID NO: 3435 - DNA, 179 bp, Homo sapiens; identical to SEQ ID NO: 3022

SEQ ID NO: 3436 - DNA, 179 bp, Homo sapiens; identical to SEQ ID NO: 3051

SEQ ID NO: 3437 - DNA, 179 bp, Homo sapiens
ccacatttcataagccaataatttctccctttagaattttatttttgcataaaccagtgtgagttgtgtttctatgagttgagtgaagtmagctgagaatccatgagtcccgctgattattgcgatgtaatatatgatcaccacattgcaggcactgtgctaggcaacaggtggaaaaa

SEQ ID NO: 3438 - DNA, 179 bp, Homo sapiens; identical to SEQ ID NO: 3324

SEQ ID NO: 3439 - DNA, 179 bp, Homo sapiens; identical to SEQ ID NO: 3058

SEQ ID NO: 3440 - DNA, 179 bp, Homo sapiens; identical to SEQ ID NO: 3060

SEQ ID NO: 3441 - DNA, 179 bp, Homo sapiens; identical to SEQ ID NO: 3065

SEQ ID NO: 3442 - DNA, 179 bp, Homo sapiens; identical to SEQ ID NO: 3066

SEQ ID NO: 3443 - DNA, 179 bp, Homo sapiens; identical to SEQ ID NO: 3067

SEQ ID NO: 3444 - DNA, 179 bp, Homo sapiens; identical to SEQ ID NO: 3069

SEQ ID NO: 3445 - DNA, 179 bp, Homo sapiens
gagaatcgcttgaacctgggaggcggaggttgcagtgagccaagattgggccactgcactccaggctgggtgtctcaaaaaaaaaaaaaraaaagaaaagaaagaaagcttaagaaaaagggagagaatacaatgaggctggtcaaggaaggcctagtaagagctggtaagaccctgcc

SEQ ID NO: 3446 - DNA, 179 bp, Homo sapiens; identical to SEQ ID NO: 3072

SEQ ID NO: 3447 - DNA, 179 bp, Homo sapiens; identical to SEQ ID NO: 3073

SEQ ID NO: 3448 - DNA, 179 bp, Homo sapiens; identical to SEQ ID NO: 3076

SEQ ID NO: 3449 - DNA, 179 bp, Homo sapiens; identical to SEQ ID NO: 3080

SEQ ID NO: 3450 - DNA, 179 bp, Homo sapiens; identical to SEQ ID NO: 3082

SEQ ID NO: 3451 - DNA, 179 bp, Homo sapiens; identical to SEQ ID NO: 3083

SEQ ID NO: 3452 - DNA, 179 bp, Homo sapiens; identical to SEQ ID NO: 3084

SEQ ID NO: 3453 - DNA, 179 bp, Homo sapiens
attagatttgatgtccccccaccttccacccacaccccagcatctcatacatatttgttaggtttcttctttattgtgaattcaaagaakattcccttcagtctgatgggttcaaatgaggctcaaggctctctacctttggctcactttgcaggtcctatctttacctttactgtgct

SEQ ID NO: 3454 - DNA, 179 bp, Homo sapiens
ttctatccacagagcatcacatgtgtgcacgaatccatagaccaagggtggctctgaagggaaccaggctggtggcaatgagaaggaaayggtgtactggtatcgagtacccaccacatgccaggaccgagtcagtgtctcccatgcatcacctgccctaaccctgggaggggggcgca

SEQ ID NO: 3455 - DNA, 179 bp, Homo sapiens
ctttctttttctctttctttctctttctttctttctttctttctttctttctttctttctttctttctttctttctttcctttctttctytctttttttgagacagtcttgctctgtcgtccaggctggagtgcagtaatgtagtaccagcttactgcaacctccgcttcccgggttca

SEQ ID NO: 3456 - DNA, 179 bp, Homo sapiens
cagtgagctgagatcgcgccactgcactccaacctgggcggacagagcaagactccatctcaaaaaaaaaaaaaaaaagaaaaagaaaaraaaagaaaagaaaaccctaacggggaggtagaatctgtttggcaagttaaatgaatgaagttgaagttgtccaataaccacaccctcag

SEQ ID NO: 3457 - DNA, 179 bp, Homo sapiens
gcttgcagtgagctgagatcgcgccactgcactccaacctgggcggacagagcaagactccatctcaaaaaaaaaaaaaaaaagaaaaaraaaagaaaagaaaagaaaaccctaacggggaggtagaatctgtttggcaagttaaatgaatgaagttgaagttgtccaataaccacacc

SEQ ID NO: 3458 - DNA, 179 bp, Homo sapiens
acattatccgggtgtgatggctcacacctgtagtcacagctacttgggaggctgaggtgggaggatcacttcagtccagaagattgaggytgcattgagctatgattgtgccactgccactgcattccagcctgggtgacagagcaagatgctgtctctaaaaatcaatcaatcaatca

SEQ ID NO: 3459 - DNA, 179 bp, Homo sapiens
gaaggatgatggcaagagggtctgacatttccggattccctcagcctgctttctgatcatatgcctgttcctgccacgcagcattaggcmgggtgtgtgaacatagaggggggctggggagggaaggggggagcctttccctgggaggctgccttctgtcgctagacaaacaaacacgc

SEQ ID NO: 3460 - DNA, 179 bp, Homo sapiens
aagctctgctatgtaagcgctcagccatggtggctgttatcatgggaggctctgaaggaactctaaataggcagccacgggggtcctccrcttggatgccttttaactgatcttctgccaggtgggggcacggagctgggttatctcaccatggcctttcaacctctcagagaaccggg

SEQ ID NO: 3461 - DNA, 179 bp, Homo sapiens
gggaggaggaggctgcagtgagttgtgatcacaccactgcactctagcgtgggtgacagagtgggaccctgtctcaaaaataaaatggcraagatatggacaagaaacaaaatgttcttaatattgtaaagaaacaattcaattacaaaacaatgtatttatttatttatttattttta

SEQ ID NO: 3462 - DNA, 179 bp, Homo sapiens
catcaaactgcatggattttcacctagggacagcgggagaactcctccccaacccacccccacacacatacacactctgaatacattctrcagactaatgggaaacaaaaataaaattgttttatgaccaccccttcatccatgccttgtatgatatcccaattacactcaaagtgaag

SEQ ID NO: 3463 - DNA, 179 bp, Homo sapiens
ccaaggtttcgtagcaggtaagagtcacagctaggacctgacaccaaacgtatgcccttaggcattagtctatggcagcctctgacttcycagcttgtctatctccacttcactgtcaatctcaagttgagtcattgatcttgcctccatttacacagccccaatcacattggcatctc

SEQ ID NO: 3464 - DNA, 179 bp, Homo sapiens
ttgatcctgctgaccaacagcagacccagtctctccaccaggtacttggagctggactcatggaggctgtagttacacagaggcaggggkggacccctcttcctcccaccctcttccctctcaagcttctcctcaatagtcccattgtggctgctggacatgtgtggattctcaggtta

SEQ ID NO: 3465 - DNA, 179 bp, Homo sapiens
tgtgcaagtatctttttcatgtaatgacttcttttcctctgggtagatacccagtagtgggattgctggatcaaatggtagatctacttytagttctttaaggaatctccacactgttttccatagtggttgtactagtttacattcccaccagcaatgtagacgtgttcccttttcac

SEQ ID NO: 3466 - DNA, 179 bp, Homo sapiens
atttggatgtactcccactttctggagtaagggaaaatacaataaaaacctggacgatgatctcatggaatcctcaatttgtcaagatgyatctcttctaagtggctttttttcaaagcttgagatgcttccaaaatatttataaaaagcagcagggctcttaaaagttaggagacaat

SEQ ID NO: 3467 - DNA, 179 bp, Homo sapiens; identical to SEQ ID NO: 3117

SEQ ID NO: 3468 - DNA, 179 bp, Homo sapiens; identical to SEQ ID NO: 3081

SEQ ID NO: 3469 - DNA, 179 bp, Homo sapiens
gtgagagaatgaatgaatgaaacatttgatgacttcctttctaatccctgacttgaagaaagaaaaggtatcttagaagggaccaggccrtgctgggctagatcataagttgatcttaactccttcaaaacatagaggtccttttagtgttagaccagtggttctcaactggggatgat

SEQ ID NO: 3470 - DNA, 179 bp, Homo sapiens
acatacatacacacacacgtcccaagcaatgcttctgtgtcaggtatacccatcctcctacttaatatacacacacagacacacacacasacacacacacacactctcacgtgctactgcccaggcttataacccatcctcctaatacacacacacacacacacacacacacacacacg

SEQ ID NO: 3471 - DNA, 179 bp, Homo sapiens
taggttcattagcacaagattggtgtgttggaaggatcttcaatttcaaggcttaaacaagagactggctccagacctctgaagaaatarctttgctgggcatcaatcactttgtcagattcctgggaactggaagcaccagtgcatattttgtggtagcccacatttgagatcagact

SEQ ID NO: 3472 - DNA, 179 bp, Homo sapiens; identical to SEQ ID NO: 3014

SEQ ID NO: 3473 - DNA, 179 bp, Homo sapiens
tttctttgcctgcaggagtgccaggttcacatactggacaggctggtaggtcagagagtcatcccctgggagtactctttgattcgtgaragatggaagctagtgaataaatatttcagcttttcttgcctctcacctgggctgactctgagacatttttctgagaaatgttttatgca

SEQ ID NO: 3474 - DNA, 179 bp, Homo sapiens
cctgctgtttaagaatgtgtgtaagctgagcatgtgaggaagagacttgggagaccccacaactatactggaggtgtctgaaacataatraaagggaaaggtgtctgcggtctttgtagccagtgagcactgtatgaagctgtatggtcttaaacacaattgctacctcatgttgccat

SEQ ID NO: 3475 - DNA, 179 bp, Homo sapiens; identical to SEQ ID NO: 3016

SEQ ID NO: 3476 - DNA, 179 bp, Homo sapiens; identical to SEQ ID NO: 3017

SEQ ID NO: 3477 - DNA, 179 bp, Homo sapiens; identical to SEQ ID NO: 3020

SEQ ID NO: 3478 - DNA, 179 bp, Homo sapiens
agaaggccgggacctccaagcaatctgacaaggtagatttggggtagggaccaagaatatacatttccaacaagcaccccagggatgctrctgctagtggtggtgtgagaaccactgtgccagttctggtgccaggcacgcagcaaacagcatcaccttggacctccttgccctatacg

SEQ ID NO: 3479 - DNA, 179 bp, Homo sapiens
taagctgtcagagagcaaagcactcaggcgcagctctttggggctggaagcctagctgttgatgaataatgattcagcacagagttaacrtgttttagagatataaaaatagagactaccacgagcacactatgtttccctaagcttttcattcattagttcaacacaaagctactgag

SEQ ID NO: 3480 - DNA, 179 bp, Homo sapiens
catagctagtagggctggagctatcatttgttaggacaggagtaaaaacaaggatcaggtcctcagacttgggcttaggaagaaggttaraagggaggtggaggacaccatggcaaatgtcatccacatcacaactttactttgaatgtgtcctgcactcagaactgggcactatctcc

SEQ ID NO: 3481 - DNA, 179 bp, Homo sapiens
cctgccattgaatcccattctacaggtgagagaattgaaccacagtgatgtaaatggaatcattgggttatgaggattagttgaggtagyatattgaaagcatcaaataatgcttagcatattgtaactactcaataaatggggtaatcactttttaaagaggcagacatctagagatg

SEQ ID NO: 3482 - DNA, 179 bp, Homo sapiens
aacattgtggagattatgtcacaatttgttctctgttagtgtgtaaaatgataaaacctttctggaaagtgacttggcgatgagcttcartagttttacaactattcattttagacttccataggaaaaaataacagcagcaagcactgccaagtgttcacagtgactgtttactggta

SEQ ID NO: 3483 - DNA, 179 bp, Homo sapiens
acccacaaggagctcacacttggccagaggacatgagttggctggatgttaacaagatgaacaggcagacagacagacagttgcaacaakcatacatcattcatctagaatgcgagaagctgggtgcagtggctcttgcctgtaaccccagcactttgggaggctgaggcaggtggatc

SEQ ID NO: 3484 - DNA, 179 bp, Homo sapiens
ctgcagaaaaagatcctgttaccctttgtttagcccagcattttccatggaatatgcacatggcaaatatcagcatcccacaaaaccagytcagcaaaattcactttaggaaatctcattgtagagtaatgttctctttgatttgtaaaaagaatcagccatcagcaagtctatcatca

SEQ ID NO: 3485 - DNA, 179 bp, Homo sapiens
actggtccagtttccatcgttggttggcactatccattcctgggggctcacatttgtgggaagcctggtgagaacttggaggcccatcayagtcaaggaatggaacaagaccaactgagtcagacgagaagagagtttcttcagtttcagtttgagccaaaacctgatttatctgggat

SEQ ID NO: 3486 - DNA, 179 bp, Homo sapiens
agctgggcatggtggtgcatgcctgtggttccagctacttgagaggctgaggtgggaggatcacttgagcccggggaggtgaaggctgcrgtgagcggagattgcgccactgcactccagcctggacaacagagagagagcctgtctcaaaataataaaataaataaataaaatacaat

SEQ ID NO: 3487 - DNA, 179 bp, Homo sapiens; identical to SEQ ID NO: 2785

SEQ ID NO: 3488 - DNA, 179 bp, Homo sapiens; identical to SEQ ID NO: 3071

SEQ ID NO: 3489 - DNA, 179 bp, Homo sapiens; identical to SEQ ID NO: 3074

SEQ ID NO: 3490 - DNA, 179 bp, Homo sapiens; identical to SEQ ID NO: 3075

SEQ ID NO: 3491 - DNA, 179 bp, Homo sapiens; identical to SEQ ID NO: 3077

SEQ ID NO: 3492 - DNA, 179 bp, Homo sapiens; identical to SEQ ID NO: 3079

SEQ ID NO: 3493 - DNA, 179 bp, Homo sapiens
tatatctgcaaaattccttttgccatgtatttacacgttctggagaataagatgggggcatgatagaatttactacagcaacacaataarctgactcaagttggtagtgagctcgcatttctggatggcaataagcattcattcgttcaccaaacatccactggacacttacccttttt

SEQ ID NO: 3494 - DNA, 179 bp, Homo sapiens
tatccctgtggaaatgaacaggtgagcaaagtttgaggcactcccttggagaaatagaaaaaaaaataaacaaggccctaagttataagrtcccggaaattatacaagggaaggaagaaaacccagctatgttttatgggagatacatgaggccatcagaaaacatgcaattctagacc

SEQ ID NO: 3495 - DNA, 179 bp, Homo sapiens
tagcatgactgaggaggcctcaggaaacttacaattatggaggaaagggaagccaacacatccttcttcacacggcagcagtgagaatcragcaaaggggcaagccccttgtaaaaccatcggatcttgtgagaactcctatcttaagaacagcatggaggtaaccacccccatgattc

SEQ ID NO: 3496 - DNA, 179 bp, Homo sapiens
agcccttgtttttcactgtcttgatacatagagaaagcatgcaataaatatttgtacgatggatggatggatggatggatggatggatgsatggatgcatggatgcatggatgcatggatgagtgggagggagcttgaatgaatgttcaaattctttcctgattccttatgtaagcatg

SEQ ID NO: 3497 - DNA, 179 bp, Homo sapiens
tcctaagctggttagtgccacagctggtactagaaccttgatcttctggttcttagaaaaaacaagtatctatggttttaaggtttaagrggatcattccaaaaatgcaaaccaatctcaaaacctgactaataaaactcatagagctttgaaaggtttggtccaagaatcacagcaaa

SEQ ID NO: 3498 - DNA, 179 bp, Homo sapiens
tatgtggaattctcaaatagtcctccctgctagtaacaagcgccctgagtacttcttgagaaagtgttaggtgccaagcacttcacaagmattattgaattcacacaagaattctgctgttgttaattggtttgattttggaaaggggaaactgaggcagagagtgtacagtcacttgc

SEQ ID NO: 3499 - DNA, 179 bp, Homo sapiens
acttggagtctggattggacccaagagaggggactggtgaatttcctgaaactgaatgcagggtattgaatgtgcagcctgctcaccacmcaaaagaatgtgtaggttttagtggattcttagtagggtcatcacccctcttccccaaagaaaaacaaaacacaaaacactgatttttg

SEQ ID NO: 3500 - DNA, 179 bp, Homo sapiens
ttcaacaaatgttagtcatcagtttacctcttttcattccctcaagacatccaagctcctctccttgactgctgagaccagagctcatgyaccccttttattaacaaaacagccactttcaggcaccatcatatttgatgcctcataagaatactgtgaatatggctgggcacagtggc

SEQ ID NO: 3501 - DNA, 179 bp, Homo sapiens
gaagccaggaggacccagtgtaagatttcacttataagaaatgtccagaataggcaaagctatagaaagagaaagaagattagtggtgcstggagctgggcgaagcagtggggatttaggaatgagggctatgaggggtaggatttcttttaggggttgtggaaatgttctaaaattga

SEQ ID NO: 3502 - DNA, 179 bp, Homo sapiens
cagaattcctacccatgtctctctggctgcagaacccacatgcttttgataagtaacactcaccccaggtaaagctgggaagaatcaaakttatgtatctgctatcaggaccatgacacccaaaagtcagtccctaaaatggattactcagacagagacatttcactttatcgagaatt

SEQ ID NO: 3503 - DNA, 179 bp, Homo sapiens
tttattggattactccaaaaatgttaacattgattttttttagcaatctcagcagagaagaggctttcccagtaattccatcgaaagtcyctggtctaacactttatggcgaggattggtccagcttgaactatgtagtcactccaaaaccaacctcatagccaggggaacgctgggtc

SEQ ID NO: 3504 - DNA, 179 bp, Homo sapiens
gggcccctgcatcatgtcaggggggatcccactgctttattcttctaatacagtcagaaaagagagaagagagagtaccaggggatgcayttctgaccacacacgcatgtgtgtgtgcacgtgtacacacacacacacacacacacagagcccgttttcatttccaccatcttgcctat

SEQ ID NO: 3505 - DNA, 179 bp, Homo sapiens
aaaacagcaaataataataatagtaacagcaacggttaaatttactgggacaaggtataaagcactgtgatcaacattttacagatgttrttctatgtaattgttcaccactctacaaataagtagtgttagtcttcccattttacagataaggagaccaaggcccatagctagtaggg

SEQ ID NO: 3506 - DNA, 179 bp, Homo sapiens
ctgtcccaactactcaactctgccaaggtcatgtgaagtcagccatagacaatacataaacaaatgtgtatggctgtgttccagtaaggktttatttacaaaaacaggtggcaggcacatttggcccaagagccattaagtttgctcatctttgtgtactgaatgtcagccaatgttct

SEQ ID NO: 3507 - DNA, 179 bp, Homo sapiens
aattcaacataaaattccattgtatagacagttgaattaaccatcttctttgtcaggcataggttcatttaaaacatgttcagccgggcrcggtggcttatgcctgtaatcccagcactttgggaggccgaggcgggcagatcacaaggtcaatagatcgagaccatcctggctaacat

SEQ ID NO: 3508 - DNA, 179 bp, Homo sapiens
taagtctgaagtgtgagcattggcagaagatatttgacatttaggcagcgcataaaccattttcttgtctaactctttttctttttttcyttgttattacatatgttaaagacaatacatttttctccatgaagaagaaaattttaaaatattatctattatcttatgaccccaaaata

SEQ ID NO: 3509 - DNA, 179 bp, Homo sapiens
gtcctaataactagctctgtgacccttaagcttgttgcttaacttctctgagccacagcctccttatctgtaaaatagtaacaataataygacctatataatagggttcttctgaggattaaataaaaaaaaatacaatgaagtgttcagaaagtagtgcctggtacctggcaatggct

SEQ ID NO: 3510 - DNA, 179 bp, Homo sapiens
ctaaaacataaataaataaataaattaaataaaacaatgaggaaggctactcactaaactacagatggtgatttcctctggggagtgacrttggaggataagggattagagaaaatttttactttctttttctttttcttttttttgagacagggtctcactccgtcacccagactgga

SEQ ID NO: 3511 - DNA, 179 bp, Homo sapiens
acacctgagcccaggaggtcgaggctgcaatgagccatgattgtaccactgcactccagcctgggcaaccagccagagtgagaccctgtstaaaacataaataaataaataaattaaataaaacaatgaggaaggctactcactaaactacagatggtgatttcctctggggagtgaca

SEQ ID NO: 3512 - DNA, 179 bp, Homo sapiens
aaataggttttgccttatttaatgttttctatatttaaaaaaaaacgaagggccaggtgcagtggctcatgcctgtaatcccagcactcsaggaggccaaggtgggcagaatgcttgagtccaggagtgtgataccaacctgggtaacacagcaaaaccccatttctgctaaaacatta

SEQ ID NO: 3513 - DNA, 179 bp, Homo sapiens
ataggaataaatcaaaattcacgaagatgtttgatccccacttcttggatgttaaacagagaatgacctgggctgtgaaatctacagctrtgcacacagttttctacaatgtatgtacttaagtgccatacagttcttaaaggataattaatcattgctacccatcatcaaccctacag

SEQ ID NO: 3514 - DNA, 179 bp, Homo sapiens
atttttttgctgttcttgtttttttttttttttttttgtcttttctttttcttttttttagactgggtctcattgtcacccaggctggartgcagtggcacaatcacagctcactgcagccttgacctcccaagctcaagcaatctttctgtctcagcctcccaaattgctgagattac

SEQ ID NO: 3515 - DNA, 179 bp, Homo sapiens
tgagatcactgcaaaaaattagcttggctaactttttacgtttctttatttgtagagacaagatcttactatgttgcccaagctagtctkgaactcctgggctcaaatgatcctccatccttggccgcccaaagtgctgggattacagatgtaagccaccacacccagcccttatgttt

SEQ ID NO: 3516 - DNA, 179 bp, Homo sapiens
gcatgcctgtggttccagctacttgagaggctgaggtgggaggatcacttgagcccggggaggtgaaggctgcagtgagcggagattgcrccactgcactccagcctggacaacagagagagagcctgtctcaaaataataaaataaataaataaaatacaataaaatagaatccccaa

SEQ ID NO: 3517 - DNA, 179 bp, Homo sapiens
ttaaacaaatctattttgatgttctaaccctcctggctatgtgccaacctgatgcttttgggtgctttattagttataattgcaattgayaagactggggacatttatttgatgcctactttaggccagtgctacgctggcttggcaagaatgttgccatacatgatttgatttctttc

SEQ ID NO: 3518 - DNA, 179 bp, Homo sapiens
ggagtcagatcttttaagattcatgtgggggtaaagaattgctctttcccaagcaagaatgccaattcatgtgtctttttctcccatttrcagtgattccctcagcttttaaaataatagaagaaacacatggagcttatatggagttcatacttcatcttaggaaaaaaaaatctaca

SEQ ID NO: 3519 - DNA, 179 bp, Homo sapiens
attaaatactcatggagccagggacaagatactgttctgggtgcttcatgtctgttgtctctcttaatccttacaacagtctggtgatcragaaactcttgtaattccaatgtcagatgaggaaactgaagttcagagaggaggagtgggtaacacagccatagagcaaataatgggta

SEQ ID NO: 3520 - DNA, 179 bp, Homo sapiens
gtgtgaacaaatctcagcatggttcgtggtacactgtaggtgctcaataggaggtcatattggattagggtggctcctaatctaatgaayggcattctttctttctgtttttttttttttttttttttttttgagctggagtctcattctgttacccagactggagtgcagtggcacga

SEQ ID NO: 3521 - DNA, 179 bp, Homo sapiens
tcaacctctgtttcatcaatagtggggcttctgctgtgtctctagatgatgccttaagaaacacccactccccgtgagggatgttaccamgaagtcaagaaccaccagtaactttgaaaagtccaggttagtcatctttagttaatgcacattctggattagtcggtcataagaatgtg

SEQ ID NO: 3522 - DNA, 179 bp, Homo sapiens
atgtgtcagagcgttctggtaaatactagcgtcatcagaacaacaaacccagttttattggtgaggatgctcatctgtgactagccctgkctccagcaagaacgtgcagcctggaagtcctcctcctcctcctcttcctaatgataatggtggttgtaaaaattacagcacaactacag

SEQ ID NO: 3523 - DNA, 179 bp, Homo sapiens
acaccctcctagctctgaagagagaaggatcaagattcccatcctggctccaccgcatactggtgcaagatttagggcaagacttgccarctcttcacggtactacttcttcttcagtaaaatacataaataatacaatatctttctgggagacttgtgttgagaatttcatgagataa

SEQ ID NO: 3524 - DNA, 179 bp, Homo sapiens
ttcatttttttttgtgcgtgaccacaggaaagctggcttgcctctttgaacagctgtttattcaaccatgaaacagggataatatggttrctcaaaatgaaattgtctatctatctatctatctatctatctatctatctatctatctacacacacatacaccaaccacaggacttgag

SEQ ID NO: 3525 - DNA, 179 bp, Homo sapiens
tggggcgcagtggctcacacctgtaatcccagcactttgggaggccaaggcgggcagatcaggaggtcaggagatggagaccatcctggytaacacggtgaaaccccgtgtcttctaaaaatacaaaaaattagctagtgtggtggcgggcacctgtagtcccagctactcgggaggct

SEQ ID NO: 3526 - DNA, 179 bp, Homo sapiens
tggagacctgcagggtggtcaggagagcatagctgctgaaatacagtaacaaaatggcagaaatcccctccctccctccctccctccctyccttcctctctctttctctctctctttctttcttacactagccatcctatcaggtgtgaggtggtatctcattgtggctttgatttgca

SEQ ID NO: 3527 - DNA, 179 bp, Homo sapiens
tgcagtcatcagccaggaaagaacctggctttagccagaagccaaggtgactctggaaggctctgcagctagatctgtgggctcctgcastgctcacagctgggcagagggttctttcttgaaaggagatctggaatggggcagggctgtgactctttcacaccctaaggagggcaatg

SEQ ID NO: 3528 - DNA, 179 bp, Homo sapiens
taagcaatgagctaaggtggtgctctttgagcagaagtcaaaagagaggcaagtgaggggtccccagtgatgggacaactccaaggaacktacataagtgcccatgagaggacaagtcagtgcagagagcttagaaccatcttaagacagtaccagtcaagcaagaacttccatactcc

SEQ ID NO: 3529 - DNA, 179 bp, Homo sapiens
attctgggccttccatacattggactcttacgtaacaattaaaaagatgatgtagctctacatttattttcaaggaaatacgtcctgacrtactgctaactgagaggttatataacagtatatactgtataactctattttaataaaaacatatatttatgcataaaattattggaaag

SEQ ID NO: 3530 - DNA, 179 bp, Homo sapiens
ccagcagcacccccgccagctgtgacagcctaagatgtctccagacattgtcaaatgtcccctgggggagggaaggaggaacaggatcaycttccccactgagaatcactgttttagcacaatggagcatattaaatactcaataaactcttcttaatattaatatcatcattataaca

SEQ ID NO: 3531 - DNA, 179 bp, Homo sapiens
ttacctgggcactgtggctcacaactgttaattccagtactttgggaggctgagacaggtggatcacttgagaggtcaggagttcaagaycaacctggccaacatggtgaaaccctgtctctactataatacaataattggccgggcacggtggctcacgcctgtaatcccagcacttt

SEQ ID NO: 3532 - DNA, 179 bp, Homo sapiens
gctcaagcaatcctcctgtctcagccaaaagagtaactgcaactatagacacaggctatcatgtccagttaatctttttttttttttttwtctttttctttttctttttttttagagacaggatcttcctacgttgctctggctggtctcaaactcctgatctcaagcaattctcctcc

SEQ ID NO: 3533 - DNA, 179 bp, Homo sapiens
cctggtgccctgtgggaatgtggaaccaggctggccaaatctgatttttcagaagaggtcagaatcttgattttcaggtcaaatcttccmgtaggaaaatagtgatgattcattcaaaaccattgttttcataactggtaggcaaaataaagatctaatttcagccgacaacttgccag

SEQ ID NO: 3534 - DNA, 179 bp, Homo sapiens
cagctgcccaagataaggccaaggggcgagctgcagggaccactcctcaggcgcctgctggctctaagcagcaggctggctctggacttycctacagaaattccaccagctaggcaacatcattgtcccacttttcagatgaggaagcagccgcactaggactctgaagagtcaagtgg

SEQ ID NO: 3535 - DNA, 179 bp, Homo sapiens
gcctatgatcttcatcctaaccttacctacctggtagcatcatgcttttctctgcctcagacatctgcctggctcattcacttaattcayttaggtctttgctcaaaattcaacatcttagagagattatccttggccttgatcacacttgtcacactttatttttttaccttgttctt

SEQ ID NO: 3536 - DNA, 179 bp, Homo sapiens; identical to SEQ ID NO: 3158

SEQ ID NO: 3537 - DNA, 179 bp, Homo sapiens
tgcccaccttagcctcccaaaatactgggattataggtatgagccactgcacccagcctttttacatggctttttaaatttcattctcamaactatttttaataaaacatatcaatattgctttattaattatgaacaaacaggtctcgaacagatgtttgagaccagcctgggcaact

SEQ ID NO: 3538 - DNA, 179 bp, Homo sapiens
actcctctcactgcccatgacatacttgccttcttgcatttccttgaatccaggaagctctttcttggcttggattttagcagccatttytccctctgccaccaaggttcttccctccaattttgcacaaaaacctgagactctttccactctcaacccaaatgtcacttccccaagga

SEQ ID NO: 3539 - DNA, 179 bp, Homo sapiens
agaaaaggaaactgaggctcagagaagcacatataacttacccatggttgcacagctggtaagcggtaaaatcaggagtagattgattcrgcaaagaagaaaagcccagctgtttgtaacccaaagagatgaaacattattaccctcagagcactggggagccattgaagctttaacag

SEQ ID NO: 3540 - DNA, 179 bp, Homo sapiens
ggtagctgtgtggtggagatggaagagcaaaaactggagaaaccttttggtgattgtagagtcactatattgaccctgggctacttaatkggatttatatgtgtgggagaaatgaacttctgttttgtctgaaccactgtcagtttcactgtctgtaagagtagtcaaactttattcta

SEQ ID NO: 3541 - DNA, 179 bp, Homo sapiens; identical to SEQ ID NO: 2835

SEQ ID NO: 3542 - DNA, 179 bp, Homo sapiens
gaatgagatcatgaatatgacacatgtacctgggtcctgggctatagttagcacttcctatctggtggctatcatcatcatcatcatcakcagcagcagcagcagcagcagcagcagcagcatcaacattgttacctgtctcaggacactggccaagaatactttcattgaattgcaaa

SEQ ID NO: 3543 - DNA, 179 bp, Homo sapiens
tatatacacacatatgatatatatgtgtgtatatatgtgtgtatatatagtgtgtatatatgtatatgtgtgtgtgtgtgtgtgtgtgtrtgtatatatatatatatataattgagtgattggatcaaagccagattaaagagttacaatcctgaatgttttccaagattgttttacag

SEQ ID NO: 3544 - DNA, 179 bp, Homo sapiens
gatcggtgttcttattacttacctcaagcaacagatgaccacctggaccatttctgtctcttgagtgcaacaacaaggctcctggccccrgctgagattgtctctgtttccatgaccagtctgactccctaaccctccagaacagaccagcccccatgttctgacctgcctctccttcc

SEQ ID NO: 3545 - DNA, 179 bp, Homo sapiens
attcctttagtttgataaatagaaatcatctcttcttgttctactctggtgaacaatgcattttatacagtaaaaaacccagtcattcaytggcaaaccaaaggtgagaacccttcatttacctcttctactcaaacacagtgcaacactgccatgttcatatctacttaaaaaaataa

SEQ ID NO: 3546 - DNA, 179 bp, Homo sapiens
gataattctggttgtggatcctgaaacgtgataaagctggagaaagggagtttccaaggcaaccagccccttctttgaggggtgtgggtrgtgcttcctccccacaccttatgagccgacatccttggagggcagatcacccgtgacccccaaatatcttctcttttcacgaactctgc

SEQ ID NO: 3547 - DNA, 179 bp, Homo sapiens
caggagcctgggccgcagactggcctctgccactgtgggactcccaggagctgctaagctccttacctcagtgttcccacctgttaaacsgggacggtgcctgctctgcttatctcatggggaccgtaaggattcctgccttcagtcactcttagcaagcatgacccagcatattctat

SEQ ID NO: 3548 - DNA, 179 bp, Homo sapiens
tgcagaaccaagtgaaactgtcatttcagcgggatattatttcccgatcaacatgcgctcttcttagcaagcccgttttaatctggcagytcttaagttggactccttttaaaaagcagagcatgtttaaacaagcagacataccgagaggctaaggatatgtaccttcctggagggac

SEQ ID NO: 3549 - DNA, 179 bp, Homo sapiens
tatgtaccttcctggagggacgactgatcagtcgaggtttagggaaatgggaaacctccccccaggtcatgaccccatctcgccaggctrttcctgctgtgcaggatacccggagatcatagctaagatcctgcttcccagatactggcaggattggtctctgcctcagatcccagctc

SEQ ID NO: 3550 - DNA, 179 bp, Homo sapiens
aagttatatgcgaatgttgtgccattttatatacaggacttgagcatctacagattccggtatcctcagggggtcctggaaccaagtccyaaggataggaggggacaactgtatgagggtttccatttctccacatttttaccaacacttgttattatctgacttttggactacagtca

SEQ ID NO: 3551 - DNA, 179 bp, Homo sapiens
agttatatgcgaatgttgtgccattttatatacaggacttgagcatctacagattccggtatcctcagggggtcctggaaccaagtcccraggataggaggggacaactgtatgagggtttccatttctccacatttttaccaacacttgttattatctgacttttggactacagtcat

SEQ ID NO: 3552 - DNA, 179 bp, Homo sapiens
cttgtaaaaattaaaaatgaagggtgttgaatccagcagttccactctaagtatatgcccaaaagaactgaaagcaggacttgaagaggyatttatacatttatattcatagcagcattattcacaatagccaaaagtggaaggaagccaagtgttccccagtgggtaagtggataaac

SEQ ID NO: 3553 - DNA, 179 bp, Homo sapiens
agccgagatcacgccgttgcactccagcctgggcaacaagagtgaagctccttctcaggaaaggagaggacagggtaggggaggagaggrgaggagaggagaggagaggagaggagaggagaggagaggagaggagaggagaggagaggagaggagaggagaggagaggagaggagagg

SEQ ID NO: 3554 - DNA, 179 bp, Homo sapiens
gctggagtttgccacagagaaaatgagcaagaatgagctgacctttgttctggggtttctgttaaggccagttctaaatgaactttgagwccctcttgtgggactaccccaggaacgctttttgccgtaacttgttctcagattgcagagtcttctcttcctcaactgcccccaattta

SEQ ID NO: 3555 - DNA, 179 bp, Homo sapiens
attctcgtgcttcagcctcccaagtagctgggactacaggtgcatgccgccacacccgtgaagccagatatttttaaatgttagactggsttttattctagaagaatatggaaatgggctccaaggtttctgaggagcagagatgatgcggaacaaaaattaagacattctggatattg

SEQ ID NO: 3556 - DNA, 179 bp, Homo sapiens
actcattctctggccaatatgtaaagtatagaccatatgaaagaataacgatcttgccttgctagatcggatctagcaagcagtcagtgrtctgacgtaaaacatatctgattccatcccccttctacccaaaccctccaatggctcccagctcactcaaaataaaatccagggtcctt

SEQ ID NO: 3557 - DNA, 179 bp, Homo sapiens
ctggttcctgtccgtggcctgttagaaaacgggccacacagcaggaagtgagcagagggtgagcaaacgaagcttcatctgtattttcasctgctcgccatcactcgccttaccacctgactctgcctcttgtcaggtcagtggctgcattagattttttttttttttttttgagacag

SEQ ID NO: 3558 - DNA, 179 bp, Homo sapiens
gagcttgttttccagcaactagatggttccatctatgggtgatgggagacagtgacagatcatcaggcattagattttcataaggagcaygcaagctatatcctttgcatgcacagttcacactatggtttgtgctcctatgagaatctaatgcaggctgggcacagtggctcacgcct

SEQ ID NO: 3559 - DNA, 179 bp, Homo sapiens
aaataaaggctttaagatcactcttggtgttgtacattctattgggtttggacaaatgtgtaacaacatgtattcaccttatagtatcayaatcagaagttttgctgccttaaaaatcctctagaataggggtccccagtccctggaccatgaactggttcctgtccgtggcctgttag

SEQ ID NO: 3560 - DNA, 179 bp, Homo sapiens
ggatgctcatctgtgactagccctggctccagcaagaacgtgcagcctggaagtcctcctcctcctcctcttcctaatgataatggtggytgtaaaaattacagcacaactacagcagttaggacccctcttgtccctgggaacacccctaaatatggggaagataggaagtagaaaga

SEQ ID NO: 3561 - DNA, 179 bp, Homo sapiens
aactctgtgaggatattattactattattatcatttacaagtgaagaatccaagagtctttgaggttaaagccatttagtctgagaccayctggctaacaagaggccttttgacttcttgtcccgttctcattctgtaacctcaggctatctctctccccctctcacttgcctatttta

SEQ ID NO: 3562 - DNA, 179 bp, Homo sapiens; identical to SEQ ID NO: 3327

SEQ ID NO: 3563 - DNA, 179 bp, Homo sapiens
ctctgcttggatctaggcctcttctgtggctgttttctttctgcccctgtccctgcagctgagtgaggtcaaatccttaatacatgccasattcccccctttccctgtttttctttttgcccatctctccagtgaatggggcctggaagagcagcgcgtgggctcttatgggccttcca

SEQ ID NO: 3564 - DNA, 179 bp, Homo sapiens
cagctgaacatgtggttgaagttttaaaagggagagttcttcttgtgtgtgtgtctttgttggggagcaagaactccctgtcaaggcagyattcatgaacaaagtgaggacagtctacctggaatgttaagaaagcatttctgcactaaggatagactttggaatagaagcctgccgag

SEQ ID NO: 3565 - DNA, 179 bp, Homo sapiens
tgtgcaaaagcccacagctgggaagtggcaggactgggacttgaacccaggtcatctggatttactggctgtgatcctgaccactgctcyacactccctctctgttatgctgagccaagcttctgtctctgcctataaaatgtagatgttattatgtatctcctggggcggtcatgagg

SEQ ID NO: 3566 - DNA, 179 bp, Homo sapiens
tggagtgcagtggtgcgatcttggctcactgcaagcatgccattctcctgcctcagcctcctgagtagctgggactacaggcgccttccmccatgcctggctaattcttttttttttttttttgtatttttagtagagacggggtttcaccgtgttagccaggatgggtcttgatctcc

SEQ ID NO: 3567 - DNA, 179 bp, Homo sapiens
accctcaatagctccccatggctcttgatgcctaacataacctacaagttttggcctctgcagacctctccagctacctccacaactagrgccactctcatttttgctttccagcccatgtcctcctccttcctcagttggcttctgttaagttcctctaatgtgtagtgctccctcct

SEQ ID NO: 3568 - DNA, 179 bp, Homo sapiens
taaccacggcaacaggccgtgacatcatgacaaaaggaggactgaccttggcctggaattcaaagcaaaagcagctcataaacttctaargcaagcaggagataaatatccttagtcataaaagaacaaacgaagtttggggtggggggacgggggaaaaaaaagcagaactttttttt

SEQ ID NO: 3569 - DNA, 179 bp, Homo sapiens
gggtttctccatgttggtcaggctggtctcgaactcctgacctcaggtgatccacctgcctccacctcccaaaatgctaggattacaggygtgagccactgtgcctggccacttctatgtcttaaaacttgctttcttctcttaagacctctgttgagtcattggatgtccttgggcaa

SEQ ID NO: 3570 - DNA, 179 bp, Homo sapiens
agccctaccccttaaggatatttctccaagtatctcacaacatttctgcttgtatttattgtccaaaacccagtcacatgaccaacctcyctgcacctgagactgaaaaatgttgtatttactctgaatggccctgtgccttgctaaaaattagagtctttattacaaaagaagaataa

SEQ ID NO: 3571 - DNA, 179 bp, Homo sapiens
tgaggtgcaaaacttatctttgctacttttctggctgtgtgacttttggcaggttacttaacctctctgtgcctcagtttactcatctgyaaaacaaggattaaaataactttttcctggaattattgtaatgtttaaagctaatatttgcaagtggtctagtatagtacctagtacat

SEQ ID NO: 3572 - DNA, 179 bp, Homo sapiens
ctactgtgcgaagccggcgatgtggggggtacgagggcatgaggcgcgacccttgacctcatgttagggatgccaagggtctatctgccmaaaacactgccttatccaggttagggtgggacaggtggtgagtattgttggggatagaagaggaaggaaggaaagaagaggacagagat

SEQ ID NO: 3573 - DNA, 179 bp, Homo sapiens
gggtgcagtgagctgattgtgccactgcactccagcctgagtgacagagtgagaccctgtctcaaaaaaaaaaaaaaaaaaaaaaaaaawaataataataataataatcaaacgaataaggttttaaaagaagaattatgagtgctgctaaaattacataacaaggtgatatagtaatg

SEQ ID NO: 3574 - DNA, 179 bp, Homo sapiens; identical to SEQ ID NO: 3251

SEQ ID NO: 3575 - DNA, 179 bp, Homo sapiens
tttactcaaagcacagcaagcagaataaacattgatagtttgagggttcccccttgctgtccaagttttcccattcacctgggcacagarcaatccaggtgaatgctacatatgtggcaggttcacaccacagctgagctaccttgagcctagggaaccagacaaagaactgcaagtag

SEQ ID NO: 3576 - DNA, 179 bp, Homo sapiens
cacacacacacccctgaaagatggctaccttcactcagacgtggcatgaagatgctgggatatgggctttggggagattgccttggagarcaccctcagataggaactgcagctgctggggtgagggtgaaggatggggaggaggtgtcttttagatgctgtcttggcctgcagtctgc

SEQ ID NO: 3577 - DNA, 179 bp, Homo sapiens
agcaggaatgcaggatttgaccccaaaccttctgaataccccaggaagtaatgggggctgaggctgttttctggctatagcagagaaccytgtagtctttctctgatgcagcctttttttttttttttttttttttgagaccgtctcactctatcactcaggctggagtgcagtggtac

SEQ ID NO: 3578 - DNA, 179 bp, Homo sapiens
gaccttcactcatttataactgggggaaggaggtagtgccttcaaagggaaatggtttgaagtttctatacaaagggggaaggtatgatragcttgccaaaatactgactattctccccactctccttcctttcctctgattccacctcaaatgctgagctggactcatgatgtgtgca

SEQ ID NO: 3579 - DNA, 179 bp, Homo sapiens
ttctgaggcaatgttcccgatagtggttcctctgttctcctaggtccaggactaaggaccatggagaaaagagtcccctgttgacctgcyttacacttgtgttgtgaatgagaaataagctgttgtaatactaagccactgagatttggggttgttcattactgcagcaaagcttagcc

SEQ ID NO: 3580 - DNA, 179 bp, Homo sapiens
gagacagtctcactctgtcactcaggctggagtgcagtggtgcaatctcggattactgcaacctccactatctgagttcaagggattctmttgcctcagcctcccaagtagctgggattacagacacccgccaccacgtctggctaatttttgtatttttagtagacatggggttttac

SEQ ID NO: 3581 - DNA, 179 bp, Homo sapiens
tttagaaaatctgctcatcccaatacagtgagatgccagtccaggagccttgaaggacagtggttgtgcccagaaagttcttctggaatygaatcctgtctccaatatcagccgtgtggccttgggagagtctctctccactcttggtgcctctgagtgccctatctatatggaatgga

SEQ ID NO: 3582 - DNA, 179 bp, Homo sapiens
ccattttcccactgggcagtcatcatgagtgtggggcatttgggatccttcagcagggagacccaggagagggtgaccatgaacctcagragcacgtctcacttcatcctggtgcagggcttctctccctttcctcgaagcttggcttttgtgcatctggaagtccttctcatctccct

SEQ ID NO: 3583 - DNA, 179 bp, Homo sapiens
gtatttttgtggttgttgttgtttgagacacagtctcactctgttgcccagctctggagtgccatggtgcgatcactgctcactacagcstcgacctcccaggctcaagtgatcctcccaccccagcctcccaagtagctaggactccacctgggtgacggagtgagacttgatctcaa

SEQ ID NO: 3584 - DNA, 179 bp, Homo sapiens
acacaactgagacaaaacaatattgaaattaggccaattaataaccctacaaagccccctaagtgtacaaatgaaaaggagaatcacatrtttcttgctttaaatcaaaggctagaaatgattaagcttaatgaggaaggcatgtgaaaagcagagatgggcagaaagctaggcctctt

SEQ ID NO: 3585 - DNA, 179 bp, Homo sapiens
agagtgacaggagagcattaagccaaacatgggggtcttctgtcctcacgttgccattaaaaccccagattcagggcattctggcctatrtcagagcccagcatctcccttggggcacggtggcatcagctatcatgactactgctgtggctttgagctctgtcatcatttctgatatc

SEQ ID NO: 3586 - DNA, 179 bp, Homo sapiens
gaggctaaagcaggaggagcatttgaggccaggagtttgggaccagcctgggcatcccatgggatgggatagctagaccccatcccccayctgtacaatttttttttttttaattagccaggcatggtggtgcatgcctgtaataccagctacttgggagactgaagcaggaggctcac

SEQ ID NO: 3587 - DNA, 179 bp, Homo sapiens
accacaaggggttgtggggaagattgagaagcattagagtgtgaacaaagtttctgaccaatgccaggcatgatgaggtaggcatttcamaagcatgggttgaatgagtgaatgagctaataagtgttgtatgaaactcatttccaaagcatttccttcaccttccatctcctttgcaa

SEQ ID NO: 3588 - DNA, 179 bp, Homo sapiens
attatcatgatgacttattctcatgtcaacatgccatgtaagcctgaagtccccattggctattttatgtccttgccttgggagtcatayagcattacttctgctgtagtcataagcctacctggactcaaggagtggggacctaggcccccagttcttgatgagaagaatcagagtca

SEQ ID NO: 3589 - DNA, 179 bp, Homo sapiens
cagaggactggggagagaggaggcttggacaagctcctcaggctttgtttaatgagaactaaagccagctttcctgagtgtacagcgtcygaggctgattcaataaagtggatgtggcatctgtacagagtagaaatgatgtggagataactcaccaatctctgcttgccttagtagga

SEQ ID NO: 3590 - DNA, 179 bp, Homo sapiens
tcaccatgtgacatgcttgttcctgctccatcttccaccatgagcaaaagctccatgaagcctcaccagcaactgagcatgtatgggcaycatgcctcctgtacagcctgcagaaccataagccaattaaacctatttcctttataaattacccagcctcaggtattttttatagggat

SEQ ID NO: 3591 - DNA, 179 bp, Homo sapiens
aattgcttgaacccaggagacagaggttgcagtgaactgagatcatgccattccaatctagcctaggtgacagagggagactctgcctcmaaataaataaataaaataaaatgagtccagaggtactttgtattattattgtaaacataatttatgaaaaatagtaaaaatatatatta

SEQ ID NO: 3592 - DNA, 179 bp, Homo sapiens; identical to SEQ ID NO: 3194

SEQ ID NO: 3593 - DNA, 179 bp, Homo sapiens
tgacatcatcaggctgaaatgagaggacaggtttcttagttctgaatgtcactaaggtgctgaatgaggtggtactttggctttcccagmcatttgctgggtttgaattattaaagtcatcatttgcgaaatttagggcttcatgaatattgccgggttgacaaactccctctaccacc

SEQ ID NO: 3594 - DNA, 179 bp, Homo sapiens
gaaaataaatgaaaaaaaaaaaaatggtggggaaggaattcaggctaaagcagtgattctcaaccaggggtgatttgcctcttctcctcygacccgggacacttggcaatgcctggagacattttctattgtcgccaactagagaagaggatgctactagcaactgctgggtagaggcc

SEQ ID NO: 3595 - DNA, 179 bp, Homo sapiens
acaacaaaaaacaaaaccccaaaaacccagctttatagaaacaggtggcaggccagatctggcccatgagctatagttgctgactcttgytccagatcataaactgctttatattggtctacagatccccagggtttaaaatcaagtagggattccaatctctggaatcatgaaacata

SEQ ID NO: 3596 - DNA, 179 bp, Homo sapiens
agacattgtcaaatgtcccctgggggagggaaggaggaacaggatcaccttccccactgagaatcactgttttagcacaatggagcataytaaatactcaataaactcttcttaatattaatatcatcattataacagggtagcacatttactgaacataaaacattcaatggctcaat

SEQ ID NO: 3597 - DNA, 179 bp, Homo sapiens
gataataaaaataaaataaattccaaagccgacttctggcctctaaccagggtatttcttgcatctcctctgtgataagaaatcgtgtcrtgaatgattggtctgaattgatgttttcaaagatcattggcttaaccagactttagtcaggtgtctgaatcttttcctgggccaatctg

SEQ ID NO: 3598 - DNA, 179 bp, Homo sapiens
cttgctcttggaaatatcaagaatacttggccctcaagacaaaccccagctctgggcctaaaagctaagttatatgttatatatttattsaaggcagcaattggccaggaaacgactataaaacacacattttgaataaaagagggagatttatggtgcaatggcgaatctgagtcata

SEQ ID NO: 3599 - DNA, 179 bp, Homo sapiens
ggtgctcgataagtggtgggtgaatagaacagatgcaaagctcaaggattccagaggaggcgtggagggaatgacaattagaggtggctytgaagaggaggactatttgacttgggctttgaagaatgcagaggagttttctgtgaggagaggggattcagggtcatgaagaaaagcac

SEQ ID NO: 3600 - DNA, 179 bp, Homo sapiens
aatattatcccagatgaaaatctgactcaattgaggtattcctttcttcaccaattgactgaagtagctaaagggacagacttgtcactrcctttatgtgatccctgaacttctgatttataggcaaaagttttattctgatcagatgacagaatgagtgaatatctagattcaaagca

SEQ ID NO: 3601 - DNA, 179 bp, Homo sapiens
ccccagccatcgtcccctctccacaccagcagctgcagaggctggagtagaagccagtgtgctcacagccccctaatggtctcccactgmctttaggctgagcagtaaaatggcctagaagatcctgccctgcacacctctctcctcatcctgcaccctgaaccgccaccccacgccgc

SEQ ID NO: 3602 - DNA, 179 bp, Homo sapiens
aagtctgatgccaggacaagtctatgatgctgacaaaatactgttttagcattattgccccagaaagactacagctgatgggacagcctrtagaaactgaggatgccaaggacagtaactatgctgggatgtgctaatgaagacagtgtaaacttgttatgaatggcaaaagcttgtgt

SEQ ID NO: 3603 - DNA, 179 bp, Homo sapiens
tatcacacagagctatggcctgaagacaaaaggagaaatgtgtttaaagcactctctgaattaaagttataatcattaacaacagggaamgataattcagatttttaataggtcatccatttccagctgccaatctgatctctgatgacctttctgtttgaaccccaaatctgaaagac

SEQ ID NO: 3604 - DNA, 179 bp, Homo sapiens; identical to SEQ ID NO: 2799

SEQ ID NO: 3605 - DNA, 179 bp, Homo sapiens
tttttaagtagggaaataaattagagtggtaataatcataacaattatataataaatgttaagaattgtaagttccccagcggtcttaawaacttaattttgttgttgtgggggaggttgtggaaattccatcatctgcatctggtgacatcatcaggctgaaatgagaggacaggttt

SEQ ID NO: 3606 - DNA, 179 bp, Homo sapiens
atctctgtgcagctgacttctggccaagcaggtgtggcctcaactgtcacctccttagagaggccttccctgaccacacagcctaagtgycccacctccacccccaactcgcagctttgtcttcatgacctggtcctgcatgtttattcagaggtccatggcctgtctaccccaccaga

SEQ ID NO: 3607 - DNA, 179 bp, Homo sapiens
tgataatagtgctgtggatcaaatgaatgaactatggtgaccgtggagtgttgggaaaggttcttaattttttcttgggccacagtcccstagagatctgggaaaagcaatgggcccggtcaagtgtagacttcatacatattctcactcaatttcagagggctgacgggacctcccac

SEQ ID NO: 3608 - DNA, 179 bp, Homo sapiens
ctccgacatctgcaacatatacttcttgattatacgcatcttgattataaaacaaccaaatgcatctacatccggaactgtcttgcgcaygaacttctaaacccaaattggaagagacagctacagatggagcacgcacagctacacgcaaacatacacatatccttctaacacctgca

SEQ ID NO: 3609 - DNA, 179 bp, Homo sapiens
agggaagggcatcccaggcagagggaagaggcagctcgagggccctggggtgggagcctgcagggaggaaggccgggacagcgagtgcasggtcaggtgaggtggggcctcggtgctggggtgagcagcgggactcgactttccatgcgtcagggaggccctagagggtttgaagctgc

SEQ ID NO: 3610 - DNA, 179 bp, Homo sapiens
gtccctttggcccctctggcctcttggtgtcacctctcctttcctacgcaagtgctctggtccagcctgttatggttctctttcccggckctctggtgaccatatcggcagggaagggtcacagccccctgagatgtggctgaggcagtttcctgccccctgcagcagtcagtcctgag

SEQ ID NO: 3611 - DNA, 179 bp, Homo sapiens
agtcatgatcacaccactgtactccagcctgggtgacagaacaagaccctgattccaaaaaaccaaaaagaagtcatggattaatctctrcagtggagtgttatacagccattaaaagaaggaaaagaggaaccagctctgagataaattaagaaacaagccaagttttaacagtgggt

SEQ ID NO: 3612 - DNA, 179 bp, Homo sapiens
ccccacctagataatttttcttatgggtcaggcgcagactgacttcctgagagcttagtggccacagagtcccaagctaaagactattayggggttaaagtggcagagaatgagaaatcatttcctcaccagcaaaatggggacatgaatatctatctctaagaattgctggggggcat

SEQ ID NO: 3613 - DNA, 179 bp, Homo sapiens
cctttaaaaaaaaatgagaacaaaggagagagtagctgaggacttattattattttttttaacatccttattttaataagttaaacaacyggttgctgtattgtgggtgtgtataggtgagtggttattactgacaaggaaaatcgtaacatctggatagaatgaccatggtcctgttg

SEQ ID NO: 3614 - DNA, 179 bp, Homo sapiens
accaaaaatataaaaaaattagccaggcggggtggcgggtgcctgtagtcccagctacttgggaggctgaggcaggagaatggcgtgaayccgggaggcggagcttgcagtgagcagagatcgcgccactgcactccagcctgggtgacagagcaagactctgtctcaaaaaaaaaaaa

SEQ ID NO: 3615 - DNA, 179 bp, Homo sapiens
ggaatacaaaacacagccctcaaatggagccttaaacaggaccagctcacactaatttgaacttggaaataaattaccatgtgaactgtyttactgaaccgtgagcctaagcaaaacgttatttttcctcaaaaaacaaaaaaaaaaaaacaaaaaaaaaaaaaccagcacttagtgaa

SEQ ID NO: 3616 - DNA, 179 bp, Homo sapiens
aagtcacttgccgaggctcacgaggctggagagtggtggactgttacggagcccaggcagatccgaatacagagcccatgtctgctcacsccgcaccaagccctggatgatgctgaatcctgctctggggggaggttctagaagcatcctctgggccagttaagtcagtgccaaaagat

SEQ ID NO: 3617 - DNA, 179 bp, Homo sapiens
gcggagaaggcggcagggggcgccggtccctaacatgcgccggtttagctcggtgttaagggtcgcgccaaccgggcaatcgcgttctckcctttttcttattttatttttattattgagccttaggactcccctgagaacgggggcaagattagggacccttgccttcctcgtagaaa

SEQ ID NO: 3618 - DNA, 179 bp, Homo sapiens
cctgccctggatgggaatgacgggaagggagtaaacagaagccttgcctgtaagccctgcttcctgccgaaggatgttggcttctgccaygagtaagctggacccagcactgaaaccctgaccagagggtgggagggaggtcaggtagaacgtggccactctcttcccacctgacacag

SEQ ID NO: 3619 - DNA, 179 bp, Homo sapiens
agataattgtatatacttgggattaaacctggcttttttcacttctcattaagcttgagtatttggtttttgtgtattagttttgcaagyagccacctagtggttttggttttgttaattaaagcatgtgattttctgaatggttgatactgaaagaattctgacaaaattacaagcaa

SEQ ID NO: 3620 - DNA, 179 bp, Homo sapiens
gagaagtgatgcttcacagagaaaggagggaacagggacctggacaacatgtcaaactgctctgtctctgatgcagagaggactcccagrtcagagacgagttggccgacctctggggaagcgcccacgtttatgatctcgacttcagaccccacagacctggggctaagtcctgaacc

SEQ ID NO: 3621 - DNA, 179 bp, Homo sapiens
gcagtgtggatgtatgttatgtgtataggtgtgtgtttgtgaatatttgtgtacagtatgtgtagtgtgggggtcttgggtgtgtgtgcrtgtgcaagagagagagatgagagaaaaattcagagtcatactgagagacataaaaacagaatgtcacagacagaataagaaaaagatct

SEQ ID NO: 3622 - DNA, 179 bp, Homo sapiens
ccttccctcataattctcctgtcgcctttcctgctttctctctgtagcattcatcatcctatgatatacccaacagtggacttatttgcytattgtttctctccacaaccataatcacagctccataggggaataaacccttctgtcttttgcttatcaacatggtcccaatgcctgaa

SEQ ID NO: 3623 - DNA, 179 bp, Homo sapiens
tagcattcatcatcctatgatatacccaacagtggacttatttgcttattgtttctctccacaaccataatcacagctccataggggaawaaacccttctgtcttttgcttatcaacatggtcccaatgcctgaagtatgcctggcagataataggtgctcaagaaatatttgttgact

1. A method of determining a susceptibility to a vascular condition selected from the group consisting of: an abnormal electrocardiogram measure, Atrial Fibrillation, Atrial Flutter, and Stroke, in a human individual, the method comprising:
obtaining sequence data about a human individual identifying at least one allele of at least one polymorphic marker, wherein different alleles of the at least one polymorphic marker are associated with different susceptibilities to the condition in humans, and
determining susceptibility to the condition from the sequence data,
wherein the at least one polymorphic marker is selected from the group consisting of rs3825214, rs6795970, rs3807989, rs7660702, rs132311, rs1733724 and rs365990, and markers in linkage disequilibrium therewith, wherein the linkage disequilibrium is characterized by a value for r² of at least 0.2.

2. The method of claim 1, wherein the abnormal electrocardiogram measure is selected from the group consisting of: an increased QRS interval, an increased PR interval, an increased QT interval, sick sinus syndrome and/or an increased heart rate.

3. The method of claim 1, wherein the sequence data is nucleic acid sequence data obtained from a biological sample containing nucleic acid from the human individual.

4. The method of claim 3, comprising analyzing nucleic acid sequence data about at least two polymorphic markers.

5. The method of claim 3, wherein the nucleic acid sequence data is obtained using a method that comprises at least one procedure selected from:
(i) amplification of nucleic acid from the biological sample;
(ii) hybridization assay using a nucleic acid probe and nucleic acid from the biological sample; and
(iii) hybridization assay using a nucleic acid probe and nucleic acid obtained by amplification of the biological sample.

6. (canceled)

7. (canceled)

8. (canceled)

9. The method of claim 1, wherein the sequence data is amino acid sequence data.

10. The method of claim 1, wherein obtaining sequence of the at least one polymorphic marker comprises determining the presence or absence of at least one at-risk allele of the at least one polymorphic marker for the condition.

11. The method of claim 1, further comprising a step of preparing a report containing results from the determination, wherein said report is written in a computer readable medium, printed on paper, or displayed on a visual display.

12. The method of claim 11, wherein the amino acid substitution is a Valine to Alanine substitution in position 1073 of a human SCN10A protein.

13. The method of claim 11, wherein the amino acid substitution is an Alanine to Valine substitution in position 1101 of a human MYH6 protein.

14. (canceled)

15. (canceled)

16. A method of assessing a subject's risk for a vascular condition selected from the group consisting of: an abnormal electrocardiogram measure, Atrial Fibrillation, Atrial Flutter, and Stroke, the method comprising:
a) obtaining nucleic acid sequence information about the individual identifying at least one allele of at least one polymorphic marker in the genome of the individual;
b) representing the nucleic acid sequence information as digital genetic profile data;
c) transforming the digital genetic profile data to generate a risk assessment report of the condition for the subject; and
d) displaying the risk assessment report on an output device;
wherein the at least one polymorphic marker comprises at least one marker selected from the group consisting of rs3825214, rs6795970, rs3807989, rs7660702, rs132311, rs1733724 and rs365990, and markers in linkage disequilibrium therewith, wherein the linkage disequilibrium is characterized by a value for r² of at least 0.2.

17. A method for determining a susceptibility to a vascular condition selected from the group consisting of: an abnormal electrocardiogram measure, Atrial Fibrillation, Atrial Flutter, and Stroke, in a human subject, comprising determining the presence or absence of at least one allele of at least one polymorphic marker in a nucleic acid sample obtained from the individual, wherein the at least one polymorphic marker is selected from the group consisting of rs3825214, rs6795970, rs3807989, rs7660702, rs132311, rs1733724 and rs365990, and markers in linkage disequilibrium therewith, wherein the linkage disequilibrium is characterized by a value for r² of at least 0.2, and wherein determination of the presence of the at least one allele is indicative of susceptibility to the condition.

18. The method of claim 16, further comprising assessing the frequency of at least one haplotype comprising at least two polymorphic markers in the subject.

19. A method of assessing a susceptibility to a vascular condition selected from the group consisting of: an abnormal electrocardiogram measure, Atrial Fibrillation, Atrial Flutter, and Stroke, in a human subject, comprising
i. obtaining sequence information about the subject for at least one polymorphic marker selected from the group consisting of rs3825214, rs6795970, rs3807989, rs7660702, rs132311, rs1733724 and rs365990, and markers in linkage disequilibrium therewith, wherein the linkage disequilibrium is characterized by a value for r² of at least 0.2, wherein different alleles of the at least one polymorphic marker are associated with different susceptibilities to the condition in humans;
ii. identifying the presence or absence of at least one allele in the at least one polymorphic marker that correlates with increased occurrence of the condition in humans;
wherein determination of the presence of the at least one allele identifies the subject as having elevated susceptibility to the condition, and
wherein determination of the absence of the at least one allele identifies the subject as not having the elevated susceptibility.

20. The method of claim 1, wherein:
markers in linkage disequilibrium with rs3825214 are selected from the group consisting of rs6489952, rs1895593, rs7966567, rs8181608, rs10744818, rs8181683, rs8181627, rs10744819, rs6489953, rs10744820, rs1895587, rs9669457, rs6489955, rs7309910, rs7308120, rs2384409, rs2891503, rs7977083, rs1895597, rs7316919, rs6489956, rs883079, rs2113433, rs3825214, rs12367410, rs10507248, rs7955405, rs10744823, rs7312625, rs4767237, rs7135659, rs1895585, rs1946295, rs1946293, rs3825215, rs1895582, rs7964303, and rs17731569;
markers in linkage disequilibrium with rs6795970 are selected from the group consisting of rs6599240, rs11129800, rs11129801, rs11710006, rs11924846, rs9990137, rs6805187, rs7617547, rs6771157, rs4076737, rs12632942, rs7430477, rs6795970, rs6801957, rs7433306, rs6780103, rs6790396, rs6800541, rs7615140, rs6599250, rs6599251, rs7430451, rs6599254, rs6599255, rs12630795, rs6798015, rs6763876, rs6599256, rs7641844, rs7432804, rs7430439, rs7651106, rs6599257, rs7610489, rs7650384, rs4414778, and rs10212338;
markers in linkage disequilibrium with rs3807989 are selected from the group consisting of rs2157799, rs721994, rs1728723, rs2049902, rs11772856, rs1858810, rs7781492, rs10464649, rs12706089, rs7782281, rs4727831, rs768108, rs717957, rs1883049, rs6959099, rs6975771, rs6976316, rs6954077, rs728690, rs10228178, rs2402081, rs2270188, rs10271007, rs4730743, rs4727833, rs2109513, rs6466579, rs3919515, rs975028, rs2215448, rs2742125, rs3779512, rs9649394, rs1474510, rs3807986, rs6466584, rs6466585, rs1476833, rs976739, rs3807989, rs3801995, rs3815412, rs11773845, rs9886215, rs9886219, rs2109516, rs3757732, rs3757733, rs7804372, rs729949, rs3807990, rs3807992, rs3807994, rs6466587, rs6466588, rs1049314, rs8713, rs6867, rs1049337, rs6961215, rs6961388, rs10280730, rs10232369, rs6959106, rs7802124, rs7802438, rs1860588, rs2052106, rs11979486, rs10273326, rs6466589, rs7795356, rs2109517, rs2056865, rs2191503, rs4727835, rs7800573, rs6955302, and rs6978354;
markers in linkage disequilibrium with rs7660702 are selected from the group consisting of rs7698203, rs6849659, rs2101134, rs10017047, rs12648692, rs13134382, rs17010599, rs7655100, rs7677064, rs10033273, rs7439720, rs900204, rs11731040, rs931195, rs17010632, rs1871864, rs1871865, rs1482085, rs11735639, rs4413396, rs13146939, rs13152150, rs13128115, rs12509904, rs12650494, rs10012090, rs7691602, rs7692808, rs7658797, rs17010697, rs343860, rs13108523, rs1482094, rs7676486, rs7660702, rs2062098, rs1482091, rs6813860, rs994285, rs343853, rs343849, rs3889735, rs2601855, rs2601857, rs7682971, rs10516755, rs1020584, rs13106553, rs12510813, rs12507272, rs13137008, rs13112493, rs4693735, rs12507198, rs13111662, rs11732231, rs11736641, rs11097071, rs7674888, rs1966862, rs12054628, rs17010839, rs11945319, rs6831420, rs7680588, rs17010851, rs17010857, rs4693736, rs13105921, rs17010887, rs17010892, rs17395020, rs17399123, rs10516756, rs1452681, rs9790823, rs7683733, rs7662174, rs7684607, rs13118915, rs17010925, rs12503243, rs7675429, rs7689056, and rs7693640;
markers in linkage disequilibrium with rs132311 are selected from the group consisting of rs6457931, rs12207916, rs1321313, rs4713994, rs1321311, rs1321310, rs4331968, rs9470361, rs6930671, rs11969445, rs9470366, rs6936993, rs9470367, rs7756236, rs9462207, rs9368950, rs9462208, rs9462209, rs9462210, rs10807170, rs4713996, rs9394368, rs4713999, rs4711457, rs6930083, rs4714001, rs1321309, rs733590, rs2395655, rs3176352, rs12207548, rs12191972, rs7767246, rs6937605, and rs7762245;
markers in linkage disequilibrium with rs1733724 are selected from the group consisting of rs1149782, rs1149781, rs1194673, rs1149776, rs1149775, rs1149772, rs1149769, rs1194671, rs1194670, rs1194669, rs1194668, rs6480837, rs1209265, rs1194664, rs1194663, rs1660760, rs12355839, rs1194743, and rs1733724; and
markers in linkage disequilibrium with rs365990 are selected from the group consisting of rs3811178, rs8022522, rs365990, rs445754, rs10149522, rs452036, rs412768, rs439735, rs388914, rs440466, rs2277474, rs7143356, rs12147570, rs2284651, rs7149517, rs2331979, rs3729833, rs765021, rs7140721, rs3729829, rs3729828, rs3729825, rs7159367, rs12894524, rs2277475, rs12147533, rs743567, rs7157716, and rs2754163.

21. The method of claim 1, wherein the presence of at least one allele selected from the group consisting of the G allele of rs3825214, the A allele of rs6795970, the A allele of rs3807989, the T allele of rs7660702, the T allele of rs132311, the T allele of rs1733724 and the G allele of rs365990 is indicative of an increased susceptibility to a condition selected from the group of: an increased QRS interval, an increased PR interval, an increased QT interval, sick sinus syndrome, and an increased heart rate.

22. The method of claim 1, wherein the presence of at least one allele selected from the group consisting of the G allele of rs3825214, the A allele of rs6795970, the A allele of rs3807989, and the T allele of rs7660702 is indicative of susceptibility to an increased PR interval in the subject.

23. The method of claim 1, wherein the presence of at least one allele selected from the group consisting of the T allele of rs132311, the T allele of rs1733724 and the G allele of rs365990 is indicative of susceptibility to an increased QRS interval in the subject.

24. The method of claim 1, wherein the presence of the G allele of rs365990 is indicative of susceptibility to an increased heart rate in the subject.

25. The method of claim 1, wherein the presence of the G allele of rs382514 is indicative of susceptibility to an increased QT interval in the subject.

26. The method of claim 1, wherein the presence of the G allele of rs3825214 is indicative of susceptibility to advanced atrioventricular block (AVB) in the subject.

27. The method of claim 1, wherein the presence of the G allele of rs3825214 is indicative of susceptibility to pacemaker placement in the subject.

28. The method of claim 1, wherein the presence of the G allele of rs3825214 is indicative of susceptibility to a condition selected from the group consisting of: increased PR interval, increased QRS interval, increased QT interval, atrioventricular block, and pacemaker placement, in the subject.

29. The method of claim 1, wherein the presence of at least one allele selected from the group consisting of: the A allele of rs3825214 and the G allele of rs3807989, is indicative of increased susceptibility to Atrial Fibrillation or Atrial Flutter in the subject.

30. The method of claim 1, wherein the at least one allele is associated with a decreased susceptibility of the condition in humans.

31. A method of determining a susceptibility to a vascular condition selected from the group consisting of: an abnormal electrocardiogram measure, Atrial Fibrillation, Atrial Flutter, and Stroke, the method comprising:
obtaining sequence data about a human individual identifying at least one allele of at least one polymorphic marker, wherein different alleles of the at least one polymorphic marker are associated with different susceptibilities to the condition in humans, and
determining a susceptibility to the condition from the sequence data,
wherein the at least one polymorphic marker is a marker associated with a gene selected from the group consisting of: the human TBXS gene, the human SCN10A gene, the human CAV1 gene, the human ARHGAP24 gene, the human CDKN1A gene and the human MYH6 gene.

32. The method of claim 31, wherein the at least one polymorphic marker is selected from the group consisting of rs3825214, rs6795970, rs3807989, rs7660702, rs132311, rs1733724 and rs365990, and markers in linkage disequilibrium therewith, wherein the linkage disequilibrium is characterized by a value for r² of at least 0.2.

33. The method of claim 32, wherein:
the at least one marker associated with the human TBX5 gene is selected from the group consisting of rs3825214, and markers in linkage disequilibrium therewith, wherein the linkage disequilibrium is characterized by a value for r² of at least 0.2;
the at least one marker associated with the human SCN10A gene is selected from the group consisting of rs6795970, and markers in linkage disequilibrium therewith, wherein the linkage disequilibrium is characterized by a value for r² of at least 0.2;
the at least one marker associated with the human CAV1 gene is selected from the group consisting of rs3807989, and markers in linkage disequilibrium therewith, wherein the linkage disequilibrium is characterized by a value for r² of at least 0.2;
the at least one marker associated with the human ARHGAP24 gene is selected from the group consisting of rs7660702, and markers in linkage disequilibrium therewith, wherein the linkage disequilibrium is characterized by a value for r² of at least 0.2;
the at least one marker associated with the human CDKN1A gene is selected from the group consisting of rs132311, and markers in linkage disequilibrium therewith, wherein the linkage disequilibrium is characterized by a value for r² of at least 0.2; and
the at least one marker associated with the human MYH6 gene is selected from the group consisting of rs365990, and markers in linkage disequilibrium therewith, wherein the linkage disequilibrium is characterized by a value for r² of at least 0.2.

34. The method of claim 1, further comprising reporting the susceptibility to at least one entity selected from the group consisting of the individual, a guardian of the individual, a genetic service provider, a physician, a medical organization, and a medical insurer.

35. A method of identification of a marker for use in assessing susceptibility to a vascular condition selected from the group consisting of: an abnormal electrocardiogram measure, Atrial Fibrillation, Atrial Flutter, and Stroke, in human individuals, the method comprising
a. identifying at least one polymorphic marker in linkage disequilibrium with at least one marker selected from the group consisting of rs3825214, rs6795970, rs3807989, rs7660702, rs132311, rs1733724 and rs365990, wherein the linkage disequilibrium is characterized by a value for r² of at least 0.2;
b. obtaining sequence information about the at least one polymorphic marker in a group of individuals diagnosed with the condition; and
c. obtaining sequence information about the at least one polymorphic marker in a group of control individuals;
wherein determination of a significant difference in frequency of at least one allele in the at least one polymorphism in individuals diagnosed with the condition as compared with the frequency of the at least one allele in the control group is indicative of the at least one polymorphism being useful for assessing susceptibility to the condition.

36. The method of claim 35, wherein an increase in frequency of the at least one allele in the at least one polymorphism in individuals diagnosed with the condition, as compared with the frequency of the at least one allele in the control group, is indicative of the at least one polymorphism being useful for assessing increased susceptibility to the condition.

37. The method of claim 35, wherein a decrease in frequency of the at least one allele in the at least one polymorphism in individuals diagnosed with the condition, as compared with the frequency of the at least one allele in the control group, is indicative of the at least one polymorphism being useful for assessing decreased susceptibility to, or protection against, the condition.

38-43. (canceled)

44. The method of claim 1, further comprising determining at least one biomarker in a sample from the individual.

45. The method of claim 44, wherein the biomarker is a protein biomarker selected from the group consisting of fibrin D-dimer, prothrombin activation fragment 1.2 (F1.2), thrombin-antithrombin III complexes (TAT), fibrinopeptide A (FPA), lipoprotein-associated phospholipase A2 (1p-PLA2), beta-thromboglobulin, platelet factor 4, P-selectin, von Willebrand Factor, pro-natriuretic peptide (BNP), matrix metalloproteinase-9 (MMP-9), PARK7, nucleoside diphosphate kinase (NDKA), tau, neuron-specific enolase, B-type neurotrophic growth factor, astroglial protein S-100b, glial fibrillary acidic protein, C-reactive protein, serum amyloid A, matrix metalloproteinase-9, vascular and intracellular cell adhesion molecules, tumor necrosis factor alpha, and interleukins, including interleukin-1, -6, and -8.

46. A kit for assessing susceptibility to a vascular condition selected from the group consisting of: an abnormal electrocardiogram measure, Atrial Fibrillation, Atrial Flutter, and Stroke, the kit comprising:
reagents for selectively detecting at least one allele of at least one polymorphic marker in the genome of the individual, wherein the polymorphic marker is selected from the group consisting of rs3825214, rs6795970, rs3807989, rs7660702, rs132311, rs1733724 and rs365990, and markers in linkage disequilibrium therewith, wherein the linkage disequilibrium is characterized by a value for r² of at least 0.2, and
a collection of data comprising correlation data between the at least one polymorphism and susceptibility to the condition.

47. The kit of claim 46, wherein the collection of data is on a computer-readable medium.

48. The kit of claim 46, wherein the kit comprises reagents for detecting no more than 100 alleles, or no more than 20 alleles, in the genome of the individual.

49-52. (canceled)

53. A computer-readable medium having computer executable instructions for determining susceptibility to a vascular condition selected from the group consisting of: an abnormal electrocardiogram measure, Atrial Fibrillation, Atrial Flutter, and Stroke, the computer readable medium comprising:
data indicative of at least one polymorphic marker;
a routine stored on the computer readable medium and adapted to be executed by a processor to determine risk of developing the condition for the at least one polymorphic marker;
wherein the at least one polymorphic marker is selected from the group consisting of rs3825214, rs6795970, rs3807989, rs7660702, rs132311, rs1733724 and rs365990, and markers in linkage disequilibrium therewith, wherein the linkage disequilibrium is characterized by a value for r² of at least 0.2.

54. The computer-readable medium of claim 53, wherein the medium contains data indicative of at least two polymorphic markers.

55. (canceled)

56. An apparatus for determining a genetic indicator for a vascular condition selected from the group consisting of: an abnormal electrocardiogram measure, Atrial Fibrillation, Atrial Flutter, and Stroke, in a human individual, comprising:
a processor;
a computer readable memory having computer executable instructions adapted to be executed on the processor to analyze marker and/or haplotype information for at least one human individual with respect to at least one polymorphic marker selected from the group consisting of rs3825214, rs6795970, rs3807989, rs7660702, rs132311, rs1733724 and rs365990, and markers in linkage disequilibrium therewith, wherein the linkage disequilibrium is characterized by a value for r² of at least 0.2, and generate an output based on the marker or haplotype information, wherein the output comprises a measure of susceptibility of the at least one marker or haplotype as a genetic indicator of the condition for the human individual.

57. The apparatus according to claim 56, wherein the computer readable memory further comprises data indicative of the risk of developing the condition associated with at least one allele of at least one polymorphic marker or at least one haplotype, and wherein a risk measure for the human individual is based on a comparison of the at least one marker and/or haplotype status for the human individual to the risk of the condition associated with the at least one allele of the at least one polymorphic marker or the at least one haplotype.

58. The apparatus according to claim 56, wherein the computer readable memory further comprises data indicative of the frequency of at least one allele of at least one
polymorphic marker or at least one haplotype in a plurality of individuals diagnosed with the condition, and data indicative of the frequency of at the least one allele of at least one polymorphic marker or at least one haplotype in a plurality of reference individuals, and wherein risk of developing the condition is based on a comparison of the frequency of the at least one allele or haplotype in individuals diagnosed with the condition and reference individuals.

59. The apparatus according to claim 56, wherein the risk measure is characterized by an Odds Ratio (OR) or a Relative Risk (RR).

60-64. (canceled)
